(19) United States
(12) Patent Application Publication
(10) Pub. No.: US 2019/0201443 A1
(43) Pub. Date: Jul. 4, 2019

(54) SIGNALING AND ANTIGEN-PRESENTING BIFUNCTIONAL RECEPTORS (SABR)

(71) Applicant: California Institute of Technology, Pasadena, CA (US)

(72) Inventors: Alok V Joglekar, Pasadena, CA (US); Michael T Leonard, Pasadena, CA (US); Michael T Bethune, Pasadena, CA (US); David Baltimore, Pasadena, CA (US)

(21) Appl. No.: 16/122,562

(22) Filed: Sep. 5, 2018

Related U.S. Application Data
(60) Provisional application No. 62/554,652, filed on Sep. 6, 2017.

(51) Int. Cl. A61K 35/17; C07K 14/725; C12N 5/0783; A61P 37/00

(52) U.S. Cl. CPC A61K 35/17; A61P 37/00; C12N 5/0636; C07K 14/7051

(57) ABSTRACT

Described herein are compositions and methods for signaling and antigen-presenting bifunctional receptors (SABRs) comprising one or more antigen presenting domains; and one or more signal transduction domains, wherein the one or more antigen presenting domains comprise a binding fragment of a major histocompatibility complex (MHC) molecule. Various immunological functions of the SABRs are also described.

### CROSS-REFERENCE TO RELATED APPLICATIONS

[0001] Any and all applications for which a foreign or domestic priority claim is identified in the Application Data Sheet as filed with the present application are hereby incorporated by reference under 37 CFR 1.57. This application claims the benefit of U.S. Provisional Application 62/554,652 filed on Sep. 6, 2017, which is hereby incorporated by reference in its entirety.

### BACKGROUND

### Field

[0002] Embodiments described herein relate generally to molecules for immunological use and treatment.

### Description

[0003] T cells are an integral part of the immune response to pathogens and cancers. T cells respond to specific antigenic epitopes presented on major histocompatibility complex (MHC) molecules on their target cells. Antigen recognition by T cells is mediated by their T cell receptor (TCR), which triggers an intracellular signal leading to T cell activation followed by a functional response. However, MHC molecules that present antigens lack signaling domains, and hence cannot induce a response in the target cells. Therefore, the TCR-Antigen-MHC interaction results in a unidirectional signal towards the T cell. Lack of signaling towards the target cells is a major limitation in the potential use of TCR-Antigen-MHC interactions for various functions. Thus, new, scalable techniques and molecules that expand the utilization of TCR-Antigen-MHC interactions are needed.

### SUMMARY

[0004] Some embodiments herein relate to a signaling and antigen-presenting bifunctional receptor (SABR) comprising: an antigen presenting domain, and a signal transduction domain, wherein the antigen presenting domain comprises a binding fragment of a MHC molecule.

[0005] Some embodiments herein relate to a SABR, wherein the antigen presenting domain comprises a MHC.

[0006] Some embodiments herein relate to a nucleic acid encoding for a SABR.

[0007] Some embodiments herein relate to a cell comprising the nucleic acid encoding for a SABR.

[0008] Some embodiments herein relate to a SABR, wherein the MHC comprises a Class I MHC.

[0009] Some embodiments herein relate to a SABR, wherein the MHC comprises a Class II MHC.

[0010] Some embodiments herein relate to a SABR, further comprising a peptide, wherein the peptide comprises an epitope, wherein the peptide epitope is covalently linked to the SABR, and wherein the antigen presenting domain binds to the peptide.

[0011] Some embodiments herein relate to a SABR, wherein the signal transduction domain comprises a T cell signaling domain.

[0012] Some embodiments herein relate to a SABR, wherein the signal transduction domain is derived from a cytokine receptor, wherein the cytokine receptor comprises IL2, IL4, EPO, GM-CSF, JAK-STAT, CCL10, a G protein coupled receptor, or a receptor of the TNF Receptor superfamily.

[0013] Some embodiments herein relate to a SABR, wherein the signal transduction domain comprises 4-1BB (CD137), CD28, CD27, DAP10, ICOS, OX40, PD1, CTLA4, TIM3, CD3zeta, Notch, synNotch, chemical-induced dimerization, CD79A, CD79B, CD72, CD22, CD5, CD19, CD45, IL2, IL4, EPO, GM-CSF, JAK-STAT, CCL10, a G protein coupled receptor, a receptor of the TNF receptor superfamily, a NK cell receptor, a Fc receptor, a toll-like receptor, a RIG-I-like receptor, or a NOD-like receptors.

[0014] Some embodiments herein relate to a SABR, further comprising a transmembrane domain.

[0015] Some embodiments herein relate to a SABR, wherein the transmembrane domain comprises a transmembrane domain from one or more of 4-1BB (CD137), CD28, CD27, DAP10, ICOS, OX40, PD1, CTLA4, TIM3, CD3zeta, Notch, synNotch, chemical-induced dimerization, CD79A, CD79B, CD72, CD22, CD5, CD19, CD45, IL2, IL4, EPO, GM-CSF, JAK-STAT, CCL10, a G protein coupled receptor, a receptor of the TNF Receptor superfamily, a NK cell receptor, a Fc receptor, a toll-like receptor, a RIG-I-like receptor, a NOD-like receptor, or an MHC molecule.

[0016] Some embodiments herein relate to a SABR, wherein the transmembrane domain comprises any one or more of the transmembrane domains of Tables 0.1, 0.2, or 0.3 (as appropriate).

[0017] Some embodiments herein relate to a SABR, wherein the antigen presenting domain comprises any one or more of the antigen presenting domains of Tables 0.1, 0.2, or 0.3 (as appropriate).

[0018] Some embodiments herein relate to a SABR, wherein the signal transduction domain comprises any one or more of the signal transduction domains of Tables 0.1, 0.2, or 0.3 (as appropriate).

[0019] Some embodiments herein relate to a SABR, wherein the antigen presenting domain is fused to the signal transduction domain.

[0020] Some embodiments herein relate to a SABR, further comprising one or more linkers.

[0021] Some embodiments herein relate to a cell comprising: an extracellular peptide-MHC complex comprising: an antigen presenting domain linked to a signal transduction domain, wherein the antigen presenting domain comprises an MHC molecule.

[0022] Some embodiments herein relate to a cell, wherein the cell comprises any one or more of the SABRs described herein.

[0023] Some embodiments herein relate to an isolated nucleic acid molecule comprising a nucleotide sequence encoding any one of the SABRs described herein.

[0024] Some embodiments herein relate to a method for preparing a signaling cell, the method comprising: providing a target cell, and introducing into the target cell a nucleic acid molecule comprising a nucleotide sequence coding for a SABR directed against at least one TCR expressed at the surface of a T cell, wherein the SABR comprises a MHC linked to a signal transduction domain.

[0025] Some embodiments herein relate to a method for antigen discovery, the method comprising: expressing any of the SABRs described herein in at least one reporter cell, wherein the at least one reporter cell produces a measurable signal upon a signal transduction event that occurs upon binding of an antigen receptor to the antigen presenting domain, incubating the at least one reporter cell with the antigen receptor to be tested for binding to the SABR, detecting a presence of the measurable signal in the at least one reporter cell when the antigen receptor binds, and identifying the at least one reporter cell producing the measurable signal, thereby identifying an antigen by associating the SABR in the cell with the reporter, with the antigen receptor.

[0026] Some embodiments herein relate to a method for antigen discovery, wherein the antigen receptor comprises a soluble molecule.

[0027] Some embodiments herein relate to a method for antigen discovery, wherein the soluble molecule comprises an antibody.

[0028] Some embodiments herein relate to a method for antigen discovery, wherein the antigen receptor is expressed on a cell.

[0029] Some embodiments herein relate to a method for antigen discovery, wherein the antigen receptor comprises a TCR expressed on a T cell.

[0030] Some embodiments herein relate to a method for antigen discovery, wherein the at least one reporter cell comprises a library of cells, wherein the library of cells have numerous different SABRs, and wherein the numerous different SABRs can bind to different antigen receptors.

[0031] Some embodiments herein relate to a method for antigen discovery, wherein the antigen receptor comprises numerous antigen receptors.

[0032] Some embodiments herein relate to a method for antigen discovery, wherein numerous different SABRs are expressed and one determines which SABR a particular antigen receptor binds to by monitoring the measurable signal and identifying which SABR is in the cell that exhibited the measurable signal.

[0033] Some embodiments herein relate to a method for antigen discovery, wherein more than one antigen receptor is present and one determines which antigen receptor binds to a particular SABR.

[0034] Some embodiments herein relate to a method for antigen discovery, wherein more than one antigen receptor and more than one SABR are present.

[0035] Some embodiments herein relate to a method for antigen discovery, wherein the at least one reporter cell comprises NFAT-GFP-Jurkat cells.

[0036] Some embodiments herein relate to a method for antigen discovery, wherein the measurable signal comes from expression of a detectable marker.

[0037] Some embodiments herein relate to a method for antigen discovery, wherein the reporter cells expressing the measurable signal are identified using flow cytometry.

[0038] Some embodiments herein relate to a method for antigen discovery, wherein the antigen receptor comprises an expressed orphan TCR.

[0039] Some embodiments herein relate to a method for antigen discovery, wherein the one or more reporter cells expresses a genetically encoded antigen or antigenic epitope.

[0040] Some embodiments herein relate to a method for antigen discovery, further comprising identifying the genetically encoded antigen or antigenic epitope by DNA sequencing.

[0041] Some embodiments herein relate to a library comprising: any of the SABRs described herein, and at least one candidate antigen receptor.

[0042] Some embodiments herein relate to a library, wherein the at least one antigen receptor is expressed on a cell, wherein the cell is an antigen receptor cell.

[0043] Some embodiments herein relate to a library, wherein the SABR is expressed on a reporter cell, such that the cell provides a detectable marker upon binding of the SABR to the antigen receptor.

[0044] Some embodiments herein relate to a library, wherein the reporter cell comprises NFAT-GFP-Jurkat cells.

[0045] Some embodiments herein relate to a library, wherein the antigen receptor cell comprises T cells comprising TCR.

[0046] Some embodiments herein relate to a library, wherein the antigen receptor cell comprises a cell expressing orphan TCR.

[0047] Some embodiments herein relate to a method for initiating a therapeutic response, the method comprising: transducing a therapeutic cell with any one or more of the SABRs described herein, and administering the therapeutic cell to a subject in need of treatment, wherein the SABR directs a cellular response in the subject upon binding to an antigen receptor in the subject.

[0048] Some embodiments herein relate to a method for initiating a therapeutic response, wherein the cellular response results in one or more of: cell mediated cytotoxicity, release of inflammatory cytokines, release of suppressive cytokines, direct suppression of target cells, release of anti-inflammatory cytokines, induction of pro-proliferative signals, induction of anti-proliferative signals, induction of apoptosis, induction of cell exhaustion markers, and direct target cell activation.

[0049] Some embodiments herein relate to a method for initiating a therapeutic response, wherein the therapeutic cell destroys a pathogenic T cell.

[0050] Some embodiments herein relate to a method for initiating a therapeutic response wherein the therapeutic cell activates a target T cell.

[0051] Some embodiments herein relate to a method for initiating a therapeutic response, wherein the therapeutic cell suppresses a pathogenic T cell.

[0052] Some embodiments herein relate to a composition comprising: a therapeutic T-cell comprising any of the SABRs described herein.

[0053] Some embodiments herein relate to a method for treating a patient comprising introducing into the patient a therapeutic T cell comprising an extracellular peptide-MHC complex, the peptide-MHC complex comprising an antigen presenting domain linked to a signal transduction domain, wherein the antigen presenting domain comprises an MHC.

[0054] Some embodiments herein relate to a SABR comprising: an extracellular binding domain comprising an MHC and a peptide epitope, a transmembrane domain, and a cytoplasmic signaling domain.

### BRIEF DESCRIPTION OF THE DRAWINGS

[0055] FIG. 1A illustrates an example SABR construct with CD8+ T cells according to various embodiments herein.

[0056] FIG. 1B illustrates an example SABR construct with CD4+ T cells according to various embodiments herein.

[0057] FIG. 1C illustrates SABR constructs according to various embodiments herein.

[0058] FIG. 1D illustrates a typical antigen presenting cell with an antigen presenting domain but no transduction signaling domain.

[0059] FIG. 1E illustrates an antigen presenting cell with a SABR comprising both an antigen presenting domain and a transduction signaling domain capable of signal induction within an antigen presenting cell.

[0060] FIG. 2A illustrates a schematic describing a use of SABRs in a reporter cell line that expresses a signal upon TCR binding or recognition according to various embodiments herein.

[0061] FIG. 2B illustrates a flowchart describing a process for antigen specific signaling by SABRs described herein.

[0062] FIG. 2C illustrates a schematic demonstrating a use of a SABR library for antigen discovery according to various embodiments herein.

[0063] FIG. 3A illustrates a schematic of T cells and target cells used to demonstrate a function of SABRs according to various embodiments herein.

[0064] FIG. 3B illustrates a chart depicting measurement of GFP expression in SABR transduced reporter cells upon co-incubation with T cells expressing TCRs.

[0065] FIG. 3C illustrates a chart demonstrating a function of B27-KK10-SCTRs in response to four different TCRs from different patients.

[0066] FIG. 4A illustrates a schematic describing a use of various SABR constructs for T cell antigen discovery according to various embodiments herein.

[0067] FIG. 4B illustrates a schematic describing a use of SCTRs to study TCR cross-reactivity or to identify heteroclitic ligands according to various embodiments herein.

[0068] FIG. 5A illustrates a schematic describing an ability of SABRs to induce cytotoxicity in response to recognition of particular T cell antigenic specificities according to various embodiments herein.

[0069] FIG. 5B illustrates a schematic describing a cytotoxicity assay used to test SABR-mediated cytotoxicity according to various embodiments herein.

[0070] FIG. 5C illustrates a chart showing results demonstrating TCR specific cytotoxicity induced by A2-NYESO-SCTRs.

[0071] FIG. 6A illustrates schematics showing SABR-F and SABR-E constructs according to various embodiments herein.

[0072] FIG. 6B illustrates a bar graph showing, on the Y-axis, % GFP+ cells at 8 hours in NFAT-GFP-Jurkats transduced with A2-MART1-SABRs and co-cultured with Jurkat cells transduced with TCRs.

[0073] FIG. 7A illustrates schematics demonstrating SABRs and TCR-pMHC specific signaling.

[0074] FIG. 7B illustrates representative flow cytometry plots from an experiment 8 hours from incubation.

[0075] FIG. 7C illustrates a bar graph of GFP expression by SABR transduced NFAT-GFP-Jurkat cells upon co-culture with TCR-transduced Jurkat cells.

[0076] FIG. 7D illustrates a graph of detection of low cell numbers by SABRs.

[0077] FIG. 7E illustrates a timecourse of GFP expression by A2-MART1-SABR transduced NFAT-GFP-Jurkat cells co-cultured with F5-transduced Jurkat cells.

[0078] FIG. 7F illustrates representative flow cytometry plots from the experiment of FIG. 7E.

[0079] FIG. 8A illustrates a schematic showing SCT, SABRs, empty SABRs, and tandem minigenes (TMGs) according to various embodiments.

[0080] FIG. 8B illustrates SABR vector constructs with a stuffer fragment showing BsmBI sites, and a cloning strategy using double stranded oligonucleotides with encoding an epitope flanked by overlaps according to various embodiments.

[0081] FIG. 8C illustrates an empty SABR construct according to various embodiments.

[0082] FIG. 8D illustrates an empty SABR (i.e. no encoded peptide) and endogenously expressed peptide according to various embodiments herein.

[0083] FIG. 8E illustrates a schematic of empty SABRs pulsed with exogenous peptide.

[0084] FIG. 8F illustrates a graph showing GFP expression by NFAT-GFP-Jurkats transduced with empty SABRs pulsed with soluble MART1 or KK10 peptides and co-cultured with Jurkat cells transduced with F5 or EC27 TCRs.

[0085] FIG. 8G illustrates a schematic of empty SABRs presenting newly translated epitopes with a TMG.

[0086] FIG. 8H illustrates a graph of GFP expression by NFAT-GFP-Jurkats co-transduced with empty B27-SABRs KK10-TMG or transduced with empty B27-SABRs and pulsed with KK10 peptide, and co-cultured with Jurkat cells transduced with F5 or EC27 TCRs.

[0087] FIG. 8I illustrates an SCDR construct with a CD3z signal transduction domain according to various embodiments herein.

[0088] FIG. 8J illustrates a bar graph showing % GFP+ frequency for various TCR-peptide variations.

[0089] FIG. 8K illustrates a bar graph showing % GFP+ frequency for various TCR-peptide composition and concentration variations.

[0090] FIG. 8L illustrates a schematic showing an SCDR construct with a tandem minigene (TMG) antigen according to various embodiments herein.

[0091] FIG. 8M illustrates a bar graph showing % GFP+ frequency for various TCR-peptide variations.

[0092] FIG. 9A illustrates representative flow cytometry plots of induction of CD69 by SABRs.

[0093] FIG. 9B illustrates a graph of cytotoxicity induced by SABR-expressing primary T cells against Jurkat cells.

[0094] FIG. 9C illustrates a bar graph of cytotoxicity induced by SABR-expressing primary T cells against autologous target cells.

[0095] FIG. 9D illustrates a schematic of an assay to measure antigen sensitivity of A2-SABR and of F5-TCR.

[0096] FIG. 9E illustrates a plot of antigen sensitivity of SABR and TCR signaling.

[0097] FIG. 10A illustrates a schematic showing a pipeline to construct custom SABR libraries according to various embodiments.

[0098] FIG. 10B illustrates a schematic showing a co-culture experiment to select cells from a SABR library that are recognized by an orphan TCR according to various embodiments.

[0099] FIG. 10C illustrates a flowchart showing a computational analysis pipeline according to various embodiments.

[0100] FIG. 11A illustrates representative flow cytometry plots.

[0101] FIG. 11B illustrates a plot of average ranks from F5 and SL9 sorts.

[0102] FIG. 11C illustrates a plot of average ranks for hits from an F5 sort.

[0103] FIG. 11D illustrates a plot of average ranks for hits from an SL9 sort.

[0104] FIG. 11E illustrates a plot of average ranks for EAAGIGILTV analogs in an A2-SABR library of Example 4.

[0105] FIG. 11F illustrates a plot of average ranks for SLYNTVATL analogs in an A2-SABR library.

[0106] FIG. 12A illustrates a representative flow cytometry plots.

[0107] FIG. 12B illustrates a plot of average ranks from neoTCR and mock sorts.

[0108] FIG. 12C illustrates a plot of average ranks for hits from a neoTCR sort.

[0109] FIG. 12D illustrates a plot of average ranks for USP7-derived epitopes in a NeoAg-SABR library.

[0110] FIG. 12E illustrates a plot showing validation of top hits identified in a NeoAg-SABR screen.

[0111] FIG. 13A illustrates a plot of a gating strategy used in co-culture assays to measure GFP expression.

[0112] FIG. 13B illustrates a plot of a gating strategy used in co-culture assays to measure GFP and CD69 expression.

[0113] FIG. 13C illustrates a plot of a gating strategy used in cytotoxicity assays.

[0114] FIG. 14A illustrates a schematic showing the structure of a SABR and signal induction by SABRs upon TCR-pHLA recognition.

[0115] FIG. 14B illustrates a schematic of a SABR showing induction of a signal by a SABR presenting Ovalbumin peptide on a mouse class II pMHC (IAb-OVA) upon recognition by cognate T cells.

[0116] FIG. 14C illustrates a bar graph showing induction of a signal by SABRs presenting Ovalbumin peptide on a mouse class II pMHC (IAb-OVA) upon recognition by cognate T cells.

[0117] FIG. 14D illustrates four combinations of HLA-DQ alleles on APCs from DQ2-DQ8 heterozygous patients.

[0118] FIG. 14E illustrates SABRs encoding four DQ2/8 combinations on separate APCs allowing their distinction.

[0119] FIG. 15A illustrates a schematic of IAb-OVA and Hum IAb-OVA SABRs and signaling induction upon recognition of an OT-II TCR.

[0120] FIG. 15B illustrates a bar graph showing signaling induction upon recognition of OT-II TCR for IAb-OVA and Hum IAb-OVA SABRs.

[0121] FIG. 16A illustrates a schematic of IAb-OVA DCH and an IAb-OVA DCH-SABR and signaling induction upon recognition of an OT-II TCR.

[0122] FIG. 16B illustrates a bar graph showing signaling induction upon recognition of mouse splenocytes expressing the OT-II TCR for IAb-OVA and Hum IAb-OVA SABRs.

[0123] FIG. 17A illustrates a line graph depicting % GFP+ cells over time.

[0124] FIG. 17B illustrates representative flow cytometry plots from the experiment.

[0125] FIG. 18A illustrates a bar graph depicting the frequency of % GFP+ for TCR-transduced Jurkat cells incubated with SCTR-transduced NFAT-GFP-Jurkat cells.

[0126] FIG. 18B illustrates a bar graph depicting the frequency of % GFP+ for TCR-transduced PBMCs incubated with SCTR-transduced NFAT-GFP-Jurkat cells.

[0127] FIG. 18C illustrates a line graph depicting the frequency over time of % GFP+ for TCR-transduced PBMCs incubated with SCTR-transduced NFAT-GFP-Jurkat cells.

[0128] FIG. 19 illustrates examples of antigenic epitopes according to various embodiments herein (e.g., for the treatment of diabetes).

[0129] FIG. 20A displays a sequence alignment for class I MHC across a wide variety of species.

[0130] FIG. 20B displays a sequence alignment for class I MHC across humans.

[0131] FIG. 20C displays a sequence alignment for class II alpha MHC across a wide variety of species.

[0132] FIG. 20D displays a sequence alignment for class II alpha MHC across humans.

[0133] FIG. 20E displays a sequence alignment for class II beta MHC across a wide variety of species.

[0134] FIG. 20F displays a sequence alignment for class II beta MHC across humans.

### DETAILED DESCRIPTION

[0135] MHC molecules that present antigens lack signaling domains, and hence cannot induce a response in the target cells. Therefore, a TCR-Antigen-MHC interaction results in a unidirectional signal towards the T cell. Lack of signaling towards the target cells is a major limitation in the potential use of TCR-Antigen-MHC interactions for various functions. Thus, new, scalable techniques and molecules that expand the utilization of TCR-Antigen-MHC interactions are needed and are provided herein (in some embodiments).

[0136] Described herein are compositions and methods for signaling and antigen-presenting bifunctional receptors (SABRs) comprising: one or more antigen presenting domains, and one or more signal transduction domains, wherein the one or more antigen presenting domains comprise a binding fragment of a major histocompatibility complex (MHC) molecule. Various immunological functions of the SABRs are also described. Various uses and functions of the SABRs are provided herein. For example, in some embodiments, the SABRs described herein may be used for antigen discovery, for suppressing and/or destroying pathogenic T cells, for initiating therapeutic responses, in methods of treatment, for construction of SABR libraries, for neoantigen discovery, as well as other uses.

### Definitions and Various Embodiments

[0137] As used herein, the section headings are for organizational purposes only and are not to be construed as limiting the described subject matter in any way. All literature and similar materials cited in this application, including but not limited to, patents, patent applications, articles, books, treatises, and internet web pages are expressly incorporated by reference in their entirety for any purpose. When definitions of terms in incorporated references appear to differ from the definitions provided in the present teachings, the definition provided in the present teachings shall control.

[0138] In this application, the use of the singular includes the plural unless specifically stated otherwise. Also, the use of “comprise”, “comprises”, “comprising”, “contain”, “contains”, “containing”, “include”, “includes”, and “including” are not intended to be limiting. It is to be understood that both the foregoing general description and the following detailed description are exemplary and explanatory only and are not restrictive. Unless defined otherwise, technical and scientific terms used herein have the same meaning as commonly understood by one of ordinary skill in the art to which this invention belongs. See, for example Singleton et al., Dictionary of Microbiology and Molecular Biology 2^{nd} ed., J. Wiley & Sons (New York, N.Y. 1994); Sambrook et al., Molecular Cloning, A Laboratory Manual, Cold Springs Harbor Press (Cold Springs Harbor, N.Y. 1989). For purposes of the present invention, the following terms are defined below. It is to be understood that both the foregoing general description and the following detailed description. are exemplary and explanatory only and are not restrictive of the invention as claimed. In this application, the use of the singular includes the plural unless specifically stated otherwise. In this application, the use of “or” means “and/or” unless stated otherwise. Furthermore, the use of the term “including”, as well as other forms, such as “includes” and “included”, is not limiting. As used in this specification and claims, the singular forms “a,” “an” and “the” include plural references unless the content clearly dictates otherwise.

[0139] As used herein, “about” means a quantity, level, value, number, frequency, percentage, dimension, size, amount, weight or length that varies by as much as 30, 25, 20, 15, 10, 9, 8, 7, 6, 5, 4, 3, 2 or 1% to a reference quantity, level, value, number, frequency, percentage, dimension, size, amount, weight or length.

[0140] As used herein, an “antigen presenting domain” refers to an extracellular domain that functions to present antigen peptide fragments to T cells responsible for cell-mediated immune responses.

[0141] As used herein, a “signal transduction domain” refers to any domain that can transmit an extracellular signal intracellularly.

[0142] As used herein, a “major histocompatibility molecule” (MHC) refers to a set of cell surface proteins essential for the acquired immune system to recognize foreign molecules. Unless otherwise noted, MHC refers to both Class I MHC and Class II MHC.

[0143] As used herein, “peptide” refers to a chain of amino acids linked to each other by peptide bonds.

[0144] As used herein, “epitope” refers to a part of an antigen that is recognized by the immune system. This can be by, for example, antibodies, B cells, or T cells.

[0145] As used herein, “T cell signaling domain” refers to a cytoplasmic T cell domain that functions to transmit an intracellular signal.

[0146] As used herein, “cytokine receptor” refers to any receptor that bind cytokines.

[0147] As used herein, “transmembrane domain” refers to an amino acid sequence that traverses and is present in the cell membrane.

[0148] As used herein, a “linker” refers to a peptide sequence occurring between protein domains.

[0149] As used herein, a “signaling cell” refers to any cell any cell that is capable for transmitting an extracellular signal intracellularly through a signaling domain.

[0150] As used herein, a “target cell” refers to a cell that bears receptors recognized by a signaling molecule.

[0151] As used herein, a “reporter cell” refers to a cell expressing reporter genes, which, when exposed to a stimulus, induces a measurable signal activity that can be readily assessed qualitatively and quantitatively.

[0152] As used herein, a “measurable signal” refers to any reporter activity that can be assessed qualitatively or quantitatively.

[0153] As used herein, “antigen discovery” refers to the process of discovering the antigens targeted by T cell responses.

[0154] As used herein, a “soluble molecule” refers to a compound soluble in a liquid.

[0155] As used herein, a “library” refers to a collection of cells having one or more signaling molecules.

[0156] As used herein, a “detectable marker” refers to any discernable characteristic in response to signal transduction.

[0157] As used herein, “flow cytometry” refers to a laser- or impedance-based, biophysical technology employed in cell counting, cell sorting, biomarker detection and protein engineering, by suspending cells in a stream of fluid and passing them through an electronic detection apparatus.

[0158] As used herein, a “therapeutic cell” refers to a cell transduced with a SABR, wherein the SABR directs a cellular response in a subject upon binding to an antigen receptor in the subject.

[0159] As used herein, a “cellular response” refers to any biochemical reaction within a cell in response to a received signal.

[0160] As used herein, a “pathogenic T cell” refers to any T cell that causes or contributes to a disease, for example, in an autoimmune disease.

[0161] As used herein, a “cytoplasmic domain” refers to amino acid sequences within the cytoplasm of a cell.

[0162] As used herein, a “vector,” interchangeably referred to as a transgenic construct, a targeting construct, or simply a construct, is a nucleic acid. As used herein, “nucleic acid” refers to deoxyribonucleic acid (DNA). In some embodiments, nucleic acid may refer to ribonucleic acid (RNA). In some embodiments, the construct as provided herein comprise one or more regulatory elements. Exemplary regulatory elements in prokaryotes include promoters, operators and ribosome binding sites. Regulatory elements that are used in eukaryotic cells can include, without limitation, transcriptional and translational control sequences, such as promoters, terminators, enhancers, insulators, splicing signals, polyadenylation signals, terminators, protein degradation signals, internal ribosome-entry element (IRES), 2A sequences, and the like, that provide for and/or regulate expression of a coding sequence and/or production of an encoded polypeptide in a host cell. For example, a promoter is a nucleotide sequence that permits binding of RNA polymerase and directs the transcription of a gene. Typically, a promoter is located in the 5′ non-coding region of a gene, proximal to the transcriptional start site of the gene. Sequence elements within promoters that function in the initiation of transcription are often characterized by consensus nucleotide sequences. Examples of promoters include, but are not limited to, promoters from bacteria, yeast, plants, viruses, and mammals (including humans). A promoter can be inducible, repressible, and/or constitutive. Inducible promoters initiate increased levels of transcription from DNA under their control in response to some change in culture conditions (for example, a change in temperature). “Treating” or “treatment” of a condition may refer to preventing the condition, slowing the onset and/or rate of development of the condition, reducing the risk of developing the condition, preventing and/or delaying the development of symptoms associated with the condition, reducing or ending symptoms associated with the condition, generating a complete or partial regression of the condition, or some combination thereof. The term “prevent” does not require the absolute prohibition of the disorder or disease.

[0163] A “therapeutically effective amount” or a “therapeutically effective dose” is an amount that produces a desired therapeutic effect in a subject, such as preventing, treating a target condition, delaying the onset of the disorder and/or symptoms, and/or alleviating symptoms associated with the condition. This amount will vary depending upon a variety of factors, including but not limited to the characteristics of the therapeutic compound (including activity, pharmacokinetics, pharmacodynamics, and bioavailability), the physiological condition of the subject (including age, sex, disease type and stage, general physical condition, responsiveness to a given dosage, and type of medication), the nature of the pharmaceutically acceptable carrier or carriers in the formulation, and/or the route of administration. One skilled in the clinical and pharmacological arts will be able to determine a therapeutically effective amount through routine experimentation, for example by monitoring a subject's response to administration of a compound and adjusting the dosage accordingly, given the present disclosure. For additional guidance, see Remington: The Science and Practice of Pharmacy 21.sup.st Edition, Univ. of Sciences in Philadelphia (USIP), Lippincott Williams & Wilkins, Philadelphia, Pa., 2005.

[0164] The term “antibody” includes, but is not limited to, genetically engineered or otherwise modified forms of immunoglobulins, such as intrabodies, chimeric antibodies, fully human antibodies, humanized antibodies, antibody fragments, and heteroconjugate antibodies (e.g., bispecific antibodies, diabodies, triabodies, tetrabodies, etc.). The term “antibody” includes cys-diabodies and minibodies. The term “antibody” includes a polypeptide of the immunoglobulin family or a polypeptide comprising fragments of an immunoglobulin that is capable of noncovalently, reversibly, and in a specific manner binding a corresponding antigen. An exemplary antibody structural unit comprises a tetramer. In some embodiments, a full-length antibody can be composed of two identical pairs of polypeptide chains, each pair having one “light” and one “heavy” chain (, connected through a disulfide bond. The recognized immunoglobulin genes include the kappa, lambda, alpha, gamma, delta, epsilon, and mu constant region genes, as well as the myriad immunoglobulin variable region genes. For full length chains, the light chains are classified as either kappa or lambda. For full length chains, the heavy chains are classified as gamma, mu, alpha, delta, or epsilon, which in turn define the immunoglobulin classes, IgG, IgM, IgA, IgD, and IgE, respectively. The N-terminus of each chain defines a variable region of about 100 to 110 or more amino acids primarily responsible for antigen recognition. The terms variable light chain (VL) and variable heavy chain (VH) refer to these regions of light and heavy chains respectively. As used in this application, an “antibody” encompasses all variations of antibody and fragments thereof. Thus, within the scope of this concept are full length antibodies, chimeric antibodies, humanized antibodies, single chain antibodies (scFv), Fab, Fab′, and multimeric versions of these fragments (e.g., F(ab′)2) with the same binding specificity. In some embodiments, the antibody binds specifically to a desired target.

[0165] The term “isolated,” when applied to a nucleic acid or protein, denotes that the nucleic acid or protein is essentially free of other cellular components with which it is associated in the natural state. In some embodiments, it can be in either a dry or aqueous solution. Purity and homogeneity can be determined using analytical chemistry techniques such as polyacrylamide gel electrophoresis or high performance liquid chromatography. A protein that is the predominant species present in a preparation is substantially purified. In particular, an isolated gene is separated from open reading frames that flank the gene and encode a protein other than the gene of interest. The term “purified” denotes that a nucleic acid or protein gives rise to essentially one band in an electrophoretic gel. In some embodiments, this can denote that the nucleic acid or protein is at least 85% pure, more preferably at least 95% pure, and most preferably at least 99% pure of molecules that are present under in vivo conditions.

[0166] The term “nucleic acid” or “polynucleotide” refers to deoxyribonucleic acids (DNA) or ribonucleic acids (RNA) and polymers thereof in either single- or double-stranded form. Unless specifically limited, the term encompasses nucleic acids containing known analogues of natural nucleotides that have similar binding properties as the reference nucleic acid and are metabolized in a manner similar to naturally occurring nucleotides. Unless otherwise indicated, a particular nucleic acid sequence also implicitly encompasses conservatively modified variants thereof (e.g., degenerate codon substitutions), alleles, orthologs, SNPs, and complementary sequences as well as the sequence explicitly indicated. Specifically, degenerate codon substitutions may be achieved by generating sequences in which the third position of one or more selected (or all) codons is substituted with mixed-base and/or deoxyinosine residues (Batzer et al., Nucleic Acid Res. 19:5081 (1991); Ohtsuka et al., J. Biol. Chem. 260:2605-2608 (1985); and Rossolini et al., Mol. Cell. Probes 8:91-98 (1994)).

[0167] The term “amino acid” refers to naturally occurring and synthetic amino acids, as well as amino acid analogs and amino acid mimetics that function in a manner similar to the naturally occurring amino acids. Naturally occurring amino acids are those encoded by the genetic code, as well as those amino acids that are later modified, e.g., hydroxyproline, gamma-carboxyglutamate, and O-phosphoserine. Amino acid analogs refer to compounds that have the same basic chemical structure as a naturally occurring amino acid, i.e., an alpha.-carbon that is bound to a hydrogen, a carboxyl group, an amino group, and an R group, e.g., homoserine, norleucine, methionine sulfoxide, methionine methyl sulfonium. Such analogs have modified R groups (e.g., norleucine) or modified peptide backbones, but retain the same basic chemical structure as a naturally occurring amino acid. Amino acid mimetics refers to chemical compounds that have a structure that is different from the general chemical structure of an amino acid, but that functions in a manner similar to a naturally occurring amino acid.

### Signaling and Antigen-Presenting Bifunctional Receptors

[0168] Some embodiments provided herein relate to a signaling and antigen-presenting bifunctional receptor (SABR) comprising: an antigen presenting domain, and a signal transduction domain. The antigen presenting domain comprises a binding fragment of a major histocompatibility complex (MHC) molecule. In some embodiments, the SABRs herein allow transduction of a signal within a target cell, which has various application as describe herein. Some embodiments provided herein relate to a SABR comprising: one or more antigen presenting domains, and a signal transduction domain, wherein the one or more antigen presenting domains comprise a binding fragment of a MHC molecule. Some embodiments provided herein relate to a SABR comprising: an antigen presenting domain, and one or more signal transduction domains, wherein the antigen presenting domain comprises a binding fragment of a MHC molecule. Some embodiments provided herein relate to a SABR comprising: one or more antigen presenting domains, and one or more signal transduction domains, wherein the one or more antigen presenting domains comprises a binding fragment of a MHC molecule.

[0169] FIG. 1A illustrates an example SABR construct with CD8+ T cells according to various embodiments herein. FIG. 1B illustrates an example SABR construct with CD4+ T cells according to various embodiments herein. In some embodiments, SABRs are constructed by linking two parts: antigen-presenting domains 102 and signal transduction domains 104. Antigen presentation to a T cell is dependent on class I and class II MHC molecules, which present peptide epitopes 106 to T cells. Class I MHC molecules 108A usually present 8-11aa long peptide epitopes to CD8+ T cells 110A, whereas Class II MHC 108B usually molecules present 12-15aa long peptide epitopes to CD4+ T cells 110B. In some embodiments, SABRs are created by linking antigen presenting domains 102 to signal transduction domains 104.

[0170] FIG. 1C illustrates SABR constructs according to various embodiments herein. In some embodiments, the antigen presenting domains 102 can be a class I MHC molecule 108A with covalently linked peptide 106 (SCTRs), or class I MHC molecule 108A without any peptide epitope (SCDRs), or a class II MHC molecules 108B with covalently linked peptide 106 (DCHR). In some embodiments, the signaling domains 104 can be derived from TCR-CD3 signaling domains similar to those used in chimeric antigen receptors (CARs), from cytokine receptors, or from other receptors that signal upon multimerization. In some embodiments, SABR-libraries can be constructed either by covalently linking the antigenic epitope or expressing the antigenic protein/epitope in SABR-expressing cells.

[0171] FIG. 1D illustrates a typical antigen presenting cell 100D with an antigen presenting domain 102D but no transduction signaling domain. FIG. 1E illustrates an antigen presenting cell 100E with a SABR comprising both an antigen presenting domain 102E and a transduction signaling domain 104E capable of signal induction within the antigen presenting cell 100E.

[0172] Some embodiments provided herein relate to a SABR comprising: an antigen presenting domain, and a signal transduction domain, wherein the antigen presenting domain comprises a binding fragment of a MHC molecule, and wherein the antigen presenting domain comprises a MHC.

[0173] Some embodiments provided herein relate to a nucleic acid encoding for any of the SABRs described herein. Some embodiments provided herein relate to a nucleic acid encoding for a SABR comprising: an antigen presenting domain, and a signal transduction domain, wherein the antigen presenting domain comprises a binding fragment of a MHC molecule.

[0174] Some embodiments provided herein relate to a cell comprising a nucleic acid encoding for any of the SABRs described herein. Some embodiments provided herein relate to a nucleic acid encoding for a SABR comprising: an antigen presenting domain, and a signal transduction domain, wherein the antigen presenting domain comprises a binding fragment of a MHC molecule.

[0175] Some embodiments provided herein relate to a SABR comprising: an antigen presenting domain, and a signal transduction domain, wherein the antigen presenting domain comprises a binding fragment of a MHC molecule, and wherein the MHC comprises a Class I MHC.

[0176] Some embodiments provided herein relate to a SABR comprising: an antigen presenting domain, and a signal transduction domain, wherein the antigen presenting domain comprises a binding fragment of a MHC molecule, and wherein the MHC comprises a Class II MHC.

[0177] Some embodiments provided herein relate to any of the SABRs described herein, further comprising a peptide. Some embodiments provided herein relate to a SABR comprising: an antigen presenting domain, a signal transduction domain, wherein the antigen presenting domain comprises a binding fragment of a MHC molecule, and a peptide. Some embodiments provided herein relate to a SABR wherein the peptide comprises an epitope. In some embodiments, any of the epitopes in tables 6.3 or 6.4 can be employed. Some embodiments provided herein relate to a SABR comprising: an antigen presenting domain, a signal transduction domain, wherein the antigen presenting domain comprises a binding fragment of a MHC molecule, and a peptide, wherein the peptide comprises an epitope, and wherein the peptide epitope is covalently linked to the SABR. Some embodiments provided herein relate to a SABR comprising: an antigen presenting domain, a signal transduction domain, wherein the antigen presenting domain comprises a binding fragment of a MHC molecule, and a peptide, wherein the peptide comprises an epitope, wherein the peptide epitope is covalently linked to the SABR, and wherein the antigen presenting domain binds to the peptide. Some embodiments provided herein relate to a SABR comprising: an antigen presenting domain, a signal transduction domain, wherein the antigen presenting domain comprises a binding fragment of a MHC molecule, and a peptide, wherein the peptide comprises an epitope, wherein the peptide epitope is covalently linked to the SABR, and wherein the antigen presenting domain does not bind to the peptide.

[0178] Some embodiments provided herein relate to a SABR comprising: an antigen presenting domain, and a signal transduction domain, wherein the antigen presenting domain comprises a binding fragment of a MHC molecule, and wherein the signal transduction domain comprises a T cell signaling domain. Some embodiments provided herein relate to a SABR comprising: an antigen presenting domain, and a signal transduction domain, wherein the antigen presenting domain comprises a binding fragment of a MHC molecule. Some embodiments provided herein relate to a SABR wherein the signal transduction domain comprises a T cell signaling domain. Some embodiments provided herein relate to a SABR wherein the T cell signaling domain comprises 4-1BB (CD137), CD28, CD27, DAP10, ICOS, OX40, PD1, CTLA4, TIM3, or CD3zeta. Some embodiments provided herein relate to a SABR comprising: an antigen presenting domain, and a signal transduction domain, wherein the antigen presenting domain comprises a binding fragment of a MHC molecule, wherein the signal transduction domain comprises a T cell signaling domain, and wherein the T cell signaling domain comprises PMID: 23667569, PMID: 22437870, PMID: 23667569, PMID: 22437870, PMID: 23667569, PMID: 22437870, PMID: 23667569, PMID: 22437870, PMID: 23667569, PMID: 22437870, PMID: 23667569, or PMID: 22437870. Some embodiments provided herein relate to a SABR comprising: an antigen presenting domain, and a signal transduction domain, wherein the antigen presenting domain comprises a binding fragment of a MHC molecule, wherein the signal transduction domain comprises a T cell signaling domain. Some embodiments provided herein relate to a SABR wherein the T cell signaling domain comprises one or more of the domains of Table 0.1. In some embodiments, fragments of one or more of the following items in Table 0.1 can also be employed.

TABLE 0.1

| | Class/ | | |
|---|---|---|---|
| Domain | Source | Function | Ref |
| 4-1BB | T cell | Antigen discovery, | PMID: 23667569, |
| (CD137) | signaling | Fratricide Immunotherapy, | PMID: 22437870 |
| | | Tolerogenic Immunotherapy | |
| CD28 | T cell | Antigen discovery, | PMID: 23667569, |
| | signaling | Fratricide Immunotherapy, | PMID: 22437870 |
| | | Tolerogenic Immunotherapy | |
| CD27 | T cell | Antigen discovery, | PMID: 23667569, |
| | signaling | Fratricide Immunotherapy, | PMID: 22437870 |
| | | Tolerogenic Immunotherapy | |
| DAP10 | T cell | Antigen discovery, | PMID: 23667569, |
| | signaling | Fratricide Immunotherapy, | PMID: 22437870 |
| | | Tolerogenic Immunotherapy | |
| ICOS, | T cell | Antigen discovery, | PMID: 23667569, |
| OX40, | signaling | Fratricide Immunotherapy, | PMID: 22437870 |
| PD1, | | Tolerogenic Immunotherapy, | |
| CTLA4, | | Modulating exhaustion | |
| TIM3 | | | |
| CD3zeta | T cell | Antigen discovery, | PMID: 23667569, |
| | signaling | Fratricide Immunotherapy, | PMID: 22437870 |
| | | Tolerogenic Immunotherapy | |

[0179] Some embodiments provided herein relate to a SABR comprising: an antigen presenting domain, and a signal transduction domain, wherein the antigen presenting domain comprises a binding fragment of a MHC molecule. Some embodiments provided herein relate to a SABR wherein the signal transduction domain is derived from a cytokine receptor. Some embodiments provided herein relate to a SABR comprising: an antigen presenting domain, and a signal transduction domain, wherein the antigen presenting domain comprises a binding fragment of a MHC molecule, wherein the signal transduction domain is derived from a cytokine receptor. Some embodiments provided herein relate to a SABR wherein the cytokine receptor comprises IL2, IL4, EPO, GM-CSF, JAK-STAT, CCL10, a G protein coupled receptor, or a receptor of the TNF Receptor superfamily. Some embodiments provided herein relate to a SABR wherein the signal transduction domain is derived from a cytokine receptor, wherein the cytokine receptor comprises PMID: 17934481, PMID: 10808165, PMID: 27317733, PMID: 17934481, PMID: 10808165, PMID: 27317733, PMID: 24679437, PMID: 24679437, PMID: 19239902. Some embodiments provided herein relate to a SABR wherein the cytokine receptor comprises one or more of the domains of Table 0.2. In some embodiments, a fragment of the cytokine receptor can be employed.

TABLE 0.2

| Domain | Class/Source | Function | Ref |
|---|---|---|---|
| Cytokines | Cytokine | Tolerogenic Immunotherapy, | PMID: 17934481; |
| such as IL2, | signaling | Immunomodulation, Vaccine boost | PMID: 10808165; |
| IL4, EPO, | | | PMID: 27317733 |
| GM-CSF | | | |
| JAK-STAT | Cytokine | Tolerogenic Immunotherapy, | PMID: 17934481; |
| | signaling | Immunomodulation, Vaccine boost | PMID: 10808165; |
| | | | PMID: 27317733 |
| Chemokines | Cytokine | Tolerogenic Immunotherapy, | PMID: 24679437 |
| such as | signaling | Immunomodulation, Vaccine boost | |
| CCL10 | | | |
| G protein | Cytokine | Tolerogenic Immunotherapy, | PMID: 24679437 |
| coupled | signaling | Immunomodulation, Vaccine boost | |
| receptors | | | |
| TNF Receptor | Cytokine | Immunomodulation, Vaccine boost | PMID: 19239902 |
| superfamily | signaling | | |

[0180] Some embodiments provided herein relate to a SABR wherein the signal transduction domain comprises 4-1BB (CD137), CD28, CD27, DAP10, ICOS, OX40, PD1, CTLA4, TIM3, CD3zeta, Notch, synNotch, chemical-induced dimerization, CD79A, CD79B, CD72, CD22, CD5, CD19, CD45, IL2, IL4, EPO, GM-CSF, JAK-STAT, CCL10, a G protein coupled receptor, a receptor of the TNF Receptor superfamily, a NK cell receptor, a Fc receptor, a toll-like receptor, a RIG-I-like receptor, or a NOD-like receptor. Some embodiments provided herein relate to a SABR comprising: an antigen presenting domain, and a signal transduction domain, wherein the antigen presenting domain comprises a binding fragment of a MHC molecule, and wherein the signal transduction domain comprises PMID: 23667569, PMID: 22437870, PMID: 23667569, PMID: 22437870, PMID: 23667569, PMID: 22437870, PMID: 23667569, PMID: 22437870, PMID: 23667569, PMID: 22437870, PMID: 23667569, PMID: 22437870, PMID: 26830878, U.S. Pat. No. 9,670,281, PMID: 26431673, PMID: 21816833, PMID: 17934481, PMID: 10808165, PMID: 27317733, PMID: 17934481, PMID: 10808165, PMID: 27317733, PMID: 24679437, PMID: 19239902, PMID: 20567250, PMID: 25045879, PMID: 15932016, PMID: 21616437, or PMID: 26632377. Some embodiments provided herein relate to a SABR and wherein the signal transduction domain comprises one or more of the domains of Table 0.3. In some embodiments, a fragment of the signal transduction domain in Table 0.3 can be employed.

TABLE 0.3

| Domain | Class/Source | Function | Ref |
|---|---|---|---|
| 4-1BB | T cell | Antigen discovery, | PMID: 23667569, |
| (CD137) | signaling | Fratricide Immunotherapy, | PMID: 22437870 |
| | | Tolerogenic Immunotherapy | |
| CD28 | T cell | Antigen discovery, | PMID: 23667569, |
| | signaling | Fratricide Immunotherapy, | PMID: 22437870 |
| | | Tolerogenic Immunotherapy | |
| CD27 | T cell | Antigen discovery, | PMID: 23667569, |
| | signaling | Fratricide Immunotherapy, | PMID: 22437870 |
| | | Tolerogenic Immunotherapy | |
| DAP10 | T cell | Antigen discovery, | PMID: 23667569, |
| | signaling | Fratricide Immunotherapy, | PMID: 22437870 |
| | | Tolerogenic Immunotherapy | |
| ICOS, OX40, | T cell | Antigen discovery, | PMID: 23667569, |
| PD1, CTLA4, | signaling | Fratricide Immunotherapy, | PMID: 22437870 |
| TIM3 | | Tolerogenic Immunotherapy, | |
| | | Modulating exhaustion | |
| CD3zeta | T cell | Antigen discovery, | PMID: 23667569, |
| | signaling | Fratricide Immunotherapy, | PMID: 22437870 |
| | | Tolerogenic Immunotherapy | |
| Notch and | Synthetic | Antigen discovery, | PMID: 26830878; |
| synNotch | domains | Immunomodulation, Vaccine boost, | U.S. Pat. No. |
| | | Modulating exhaustion | 9,670,281 |
| Chemical- | Synthetic | Antigen discovery, | PMID: 26431673 |
| induced | domains | Immunomodulation | |
| dimerization | | | |
| CD79A, B | B cell | Tolerogenic Immunotherapy, | PMID: 21816833 |
| | signaling | Immunomodulation, Vaccine boost | |
| CD72 | B cell | Tolerogenic Immunotherapy, | PMID: 21816833 |
| | signaling | Immunomodulation, Vaccine boost | |
| CD22 | B cell | Tolerogenic Immunotherapy, | PMID: 21816833 |
| | signaling | Immunomodulation, Vaccine boost | |
| CD5 | B cell | Tolerogenic Immunotherapy, | PMID: 21816833 |
| | signaling | Immunomodulation, Vaccine boost | |
| CD19 | B cell | Tolerogenic Immunotherapy, | PMID: 21816833 |
| | signaling | Immunomodulation, Vaccine boost | |
| CD45 | B cell | Tolerogenic Immunotherapy, | PMID: 21816833 |
| | signaling | Immunomodulation, Vaccine boost | |
| Cytokines | Cytokine | Tolerogenic Immunotherapy, | PMID: 17934481; |
| such as IL2, | signaling | Immunomodulation, Vaccine boost | PMID: 10808165; |
| IL4, EPO, | | | PMID: 27317733 |
| GM-CSF | | | |
| JAK-STAT | Cytokine | Tolerogenic Immunotherapy, | PMID: 17934481; |
| | signaling | Immunomodulation, Vaccine boost | PMID: 10808165; |
| | | | PMID: 27317733 |
| Chemokines | Cytokine | Tolerogenic Immunotherapy, | PMID: 24679437 |
| such as | signaling | Immunomodulation, Vaccine boost | |
| CCL10 | | | |
| G protein | Cytokine | Tolerogenic Immunotherapy, | PMID: 24679437 |
| coupled | signaling | Immunomodulation, Vaccine boost | |
| receptors | | | |
| TNF Receptor | Cytokine | Immunomodulation, Vaccine boost | PMID: 19239902 |
| superfamily | signaling | | |
| NK cell | Innate | Immunomodulation, Vaccine boost | PMID: 20567250 |
| receptors | immune | | |
| | signaling | | |
| Fc Receptors | Innate | Immunomodulation, Vaccine boost | PMID: 25045879 |
| | immune | | |
| | signaling | | |
| Toll-like | Innate | Immunomodulation, Vaccine boost | PMID: 15932016 |
| Receptors | immune | | |
| | signaling | | |
| RIG-I-like | Innate | Immunomodulation, Vaccine boost | PMID: 21616437 |
| receptors | immune | | |
| | signaling | | |
| NOD-like | Innate | Immunomodulation, Vaccine boost | PMID: 26632377 |
| receptors | immune | | |
| | signaling | | |

[0181] In some embodiments, any of the options in table 0.1 can be combined with any of the options in table 0.2 and with any of the options in table 0.3. In some embodiments, any of the options in tables 0.1-0.3 can be combined with any antigen presenting domain (MHC I or MHC II or binding domain thereof). In some embodiments, any of the SABRs provided herein can have any of the components provided in tables 0.1-0.3 in it.

[0182] Some embodiments provided herein relate to a SABR comprising a transmembrane domain.

[0183] Some embodiments provided herein relate to a SABR comprising a transmembrane domain, wherein the transmembrane domain comprises a transmembrane domain from one or more of 4-1BB (CD137), CD28, CD27, DAP10, ICOS, OX40, PD1, CTLA4, TIM3, CD3zeta, Notch, synNotch, chemical-induced dimerization, CD79A, CD79B, CD72, CD22, CD5, CD19, CD45, IL2, IL4, EPO, GM-CSF, JAK-STAT, CCL10, a G protein coupled receptor, a receptor of the TNF Receptor superfamily, a NK cell receptor, a Fc receptor, a toll-like receptor, a RIG-I-like receptor, or a NOD-like receptor, or a MHC molecule. Some embodiments provided herein relate to a SABR comprising a transmembrane domain, wherein the transmembrane domain comprises a transmembrane domain from one or more of PMID: 23667569, PMID: 22437870, PMID: 23667569, PMID: 22437870, PMID: 23667569, PMID: 22437870, PMID: 23667569, PMID: 22437870, PMID: 23667569, PMID: 22437870, PMID: 23667569, PMID: 22437870, PMID: 26830878, U.S. Pat. No. 9,670,281, PMID: 26431673, PMID: 21816833, PMID: 17934481, PMID: 10808165, PMID: 27317733, PMID: 17934481, PMID: 10808165, PMID: 27317733, PMID: 24679437, PMID: 19239902, PMID: 20567250, PMID: 25045879, PMID: 15932016, PMID: 21616437, or PMID: 26632377. Some embodiments provided herein relate to a SABR comprising a transmembrane domain, wherein the transmembrane domain comprises a transmembrane domain from one or more of the domains of Table 0.3.

[0184] Some embodiments provided herein relate to a SABR comprising: an antigen presenting domain, a signal transduction domain, wherein the antigen presenting domain comprises a binding fragment of a MHC molecule, and a transmembrane domain, wherein the transmembrane domain comprises any one or more of the transmembrane domains of Tables 0.1, 0.2, or 0.3.

[0185] Some embodiments provided herein relate to a SABR comprising: an antigen presenting domain, and a signal transduction domain, wherein the antigen presenting domain comprises a binding fragment of a MHC molecule, wherein the antigen presenting domain comprises any one or more of the antigen presenting domains of Tables 0.1, 0.2, or 0.3.

[0186] Some embodiments provided herein relate to a SABR comprising: an antigen presenting domain, and a signal transduction domain, wherein the antigen presenting domain comprises a binding fragment of a MHC molecule, and wherein the signal transduction domain comprises any one or more of the signal transduction domains of Tables 0.1, 0.2, or 0.3.

[0187] Some embodiments provided herein relate to a SABR wherein the antigen presenting domain is fused to the signal transduction domain. In some embodiments, the MHC portion of the SABR includes some or all of a MHC. In some embodiments, the MHC is a human MHC. In some embodiments, the MHC includes one or more or all of the conserved sequences of the MHC (e.g., the conserved residues within any one of FIGS. 20A-20F.

[0188] Some embodiments provided herein relate to a SABR comprising one or more linkers.

### Cell Compositions

[0189] Each of the embodiments provided herein with regard to Signaling and Antigen-Presenting Bifunctional Receptors (SABRs) can be used within the present embodiments described herein with regard to Cell Compositions.

[0190] Some embodiments provided herein relate to a cell comprising: an extracellular peptide-MHC complex comprising: an antigen presenting domain linked to a signal transduction domain, wherein the antigen presenting domain comprises an MHC molecule.

[0191] Some embodiments herein relate to a cell comprising any of the SABRs described herein. Some embodiments herein relate to a cell comprising a SABR comprising: an antigen presenting domain, and a signal transduction domain, wherein the antigen presenting domain comprises a binding fragment of a MHC molecule. Some embodiments herein relate to a cell comprising any of the SABRs described herein, wherein the antigen presenting domain comprises a MHC. Some embodiments herein relate to a cell comprising any of the SABRs described herein, wherein the MHC comprises a Class I MHC. Some embodiments herein relate to a cell comprising any of the SABRs described herein, wherein the MHC comprises a Class II MHC. Some embodiments herein relate to a cell comprising any of the SABRs described herein, the SABR further comprising a peptide, wherein the peptide comprises an epitope, wherein the peptide epitope is covalently linked to the SABR, and wherein the antigen presenting domain binds to the peptide. Some embodiments herein relate to a cell comprising any of the SABRs described herein, wherein the signal transduction domain comprises a T cell signaling domain. Some embodiments herein relate to a cell comprising any of the SABRs described herein, the SABR further comprising a transmembrane domain. Some embodiments herein relate to a cell comprising any of the SABRs described herein, the SABR further comprising a transmembrane domain comprising any one or more of the transmembrane domains of Tables 0.1, 0.2, or 0.3. Some embodiments herein relate to a cell comprising any of the SABRs described herein, wherein the antigen presenting domain comprises any one or more of the antigen presenting domains of Tables 0.1, 0.2, or 0.3. Some embodiments herein relate to a cell comprising any of the SABRs described herein, wherein the signal transduction domain comprises any one or more of the signal transduction domains of Tables 0.1, 0.2, or 0.3. Some embodiments herein relate to a cell comprising any of the SABRs described herein, wherein the antigen presenting domain is fused to the signal transduction domain. Some embodiments herein relate to a cell comprising any of the SABRs described herein, the SABR further comprising one or more linkers.

[0192] Some embodiments herein relate to a cell comprising any of the SABRs described herein, wherein the cell is sourced from any T cell line such as Jurkat cells, NFAT-GFP-Jurkat cells. Some embodiments herein relate to a cell comprising any of the SABRs described herein, wherein the cell is sourced from primary T cells from a patient or healthy donors or Natural Killer cells. Some embodiments herein relate to a cell comprising any of the SABRs described herein, wherein the cell is sourced from regulatory T cells, dendritic cells, B cells, macrophages, or Natural Killer cells.

### Nucleic Acid Encoding

[0193] Each of the embodiments provided herein with regard to Signaling and Antigen-Presenting Bifunctional Receptors can be used within the present embodiments described herein with regard to Nucleic Acid Encoding.

[0194] Some embodiments herein relate to an isolated nucleic acid molecule comprising a nucleotide sequence encoding any one of the SABRs described herein. Some embodiments herein relate to an isolated nucleic acid molecule comprising a nucleotide sequence encoding any one of the SABRs described herein, the SABR comprising: an antigen presenting domain, and a signal transduction domain, wherein the antigen presenting domain comprises a binding fragment of a MHC molecule. Some embodiments herein relate to an isolated nucleic acid molecule comprising a nucleotide sequence encoding any one of the SABRs described herein, wherein the antigen presenting domain comprises a MHC. Some embodiments herein relate to an isolated nucleic acid molecule comprising a nucleotide sequence encoding any one of the SABRs described herein, wherein the MHC comprises a Class I MHC. Some embodiments herein relate to an isolated nucleic acid molecule comprising a nucleotide sequence encoding any one of the SABRs described herein, wherein the MHC comprises a Class II MHC. Some embodiments herein relate to an isolated nucleic acid molecule comprising a nucleotide sequence encoding any one of the SABRs described herein, the SABR further comprising a peptide, wherein the peptide comprises an epitope, wherein the peptide epitope is covalently linked to the SABR, and wherein the antigen presenting domain binds to the peptide. Some embodiments herein relate to an isolated nucleic acid molecule comprising a nucleotide sequence encoding any one of the SABRs described herein, wherein the signal transduction domain comprises a T cell signaling domain. Some embodiments herein relate to an isolated nucleic acid molecule comprising a nucleotide sequence encoding any one of the SABRs described herein, the SABR further comprising a transmembrane domain. Some embodiments herein relate to an isolated nucleic acid molecule comprising a nucleotide sequence encoding any one of the SABRs described herein, the SABR further comprising a transmembrane domain, wherein the transmembrane domain comprises any one or more of the transmembrane domains of Tables 0.1, 0.2, or 0.3. Some embodiments herein relate to an isolated nucleic acid molecule comprising a nucleotide sequence encoding any one of the SABRs described herein, wherein the antigen presenting domain comprises any one or more of the antigen presenting domains of Tables 0.1, 0.2, or 0.3. Some embodiments herein relate to an isolated nucleic acid molecule comprising a nucleotide sequence encoding any one of the SABRs described herein, wherein the signal transduction domain comprises any one or more of the signal transduction domains of Tables 0.1, 0.2, or 0.3. Some embodiments herein relate to an isolated nucleic acid molecule comprising a nucleotide sequence encoding any one of the SABRs described herein, wherein the antigen presenting domain is fused to the signal transduction domain. Some embodiments herein relate to an isolated nucleic acid molecule comprising a nucleotide sequence encoding any one of the SABRs described herein, the SABR further comprising one or more linkers.

### Methods for Signaling Cell Preparation

[0195] Each of the embodiments provided above with regard Signaling and Antigen-Presenting Bifunctional Receptors (SABRs) can be used within the present embodiments described herein with regard to Methods for Signaling Cell Preparation.

[0196] Some embodiments herein relate to a method for preparing a signaling cell. The method comprises: providing a target cell, and introducing into the target cell a nucleic acid molecule comprising a nucleotide sequence coding for an SABR directed against at least one T-cell receptor (TCR) expressed at the surface of a T-cell, wherein the SABR comprises a MHC linked to a signal transduction domain.

### Methods for Antigen Discovery

[0197] Each of the embodiments provided above with regard Signaling and Antigen-Presenting Bifunctional Receptors (SABRs) can be used within the present embodiments described herein with regard to Methods for Antigen Discovery.

[0198] Antigen discovery refers to identifying one or more peptide sequences of a protein. In some embodiments, the identified antigens can be used in making vaccines for treatment of patients. In some embodiments, antigen receptor discovery refers to identifying one or more antigen receptors that recognizes a specific antigen. For example, antigen receptor discovery may comprise identifying one or more specific TCRs of a plurality of TCRs that recognize a specific antigen. In some embodiments, identified antigen receptors (e.g. TCRs) can be used for immunotherapy. In some embodiments, the SABRs described herein can be used for both antigen discovery and antigen receptor discovery.

[0199] Some embodiments herein relate to a method for antigen discovery, the method comprising: expressing any of the SABRs described herein in at least one reporter cell, wherein the reporter cell produces a measurable signal upon a signal transduction event that occurs upon binding of a an antigen receptor to the antigen presenting domain, incubating the at least one reporter cell with an antigen receptor to be tested for binding to the SABR, detecting a presence of a measurable signal in the at least one reporter cell when the antigen receptor binds, and identifying the at least one reporter cells producing the measurable signal, thereby identifying an antigen by associating the SABR in the cell with the reporter, with the antigen receptor.

[0200] Some embodiments herein relate to a method for antigen discovery, the method comprising: expressing any of the SABRs described herein in at least one reporter cell, wherein the at least one reporter cell produces a measurable signal upon a signal transduction event that occurs upon binding of a an antigen receptor to the antigen presenting domain, incubating the at least one reporter cell with an antigen receptor to be tested for binding to the SABR, detecting a presence of a measurable signal in the at least one reporter cell when the antigen receptor binds, identifying the at least one reporter cells producing the measurable signal, thereby identifying an antigen by associating the SABR in the cell with the reporter, with the antigen receptor, and identifying at least one peptide in the at least one reporter cell producing the measurable signal, thereby associating the peptide with the SABR with the antigen receptor.

[0201] FIG. 2A illustrates a schematic describing the use of SABRs in a reporter cell line that expresses a signal upon TCR signal transduction according to various embodiments herein. In some embodiments, for the use of SABRs 200 for antigen-discovery, TCR-cross-reactivity, and related approaches, SABRs 200 can be expressed in reporter cells 202 that produce a measurable signal upon signal transduction. An example of the use of SABRs 200 relies on a reporter cell line (e.g. NFAT-GFP-Jurkat cells), which express green fluorescent protein (GFP) upon T cell signal transduction. In some embodiments, T cells expressing a given TCR can be incubated with SABR-expressing, for example, NFAT-GFP-Jurkat cells. In some embodiments, the SABR-expressing cells can express GFP if a cognate antigen 204 presented by SABRs 200 is recognized by the T cells. In some embodiments, presentation of an irrelevant antigen 206, or an irrelevant TCR 208, by SABRs will not result in GFP expression, allowing identification of the SABRs 200 presenting the cognate antigen 204 by flow cytometry.

[0202] FIG. 2B illustrates a flowchart describing a process for antigen specific signaling by SABRs described herein. Jurkat cells expressing a given TCR can be co-incubated with, for example, NFAT-GFP-Jurkat cells expressing SABRs. SABRs comprising matching antigens to the expressed TCR can activate upon recognition by the TCR, which can induce signaling with the NFAT-GFP-Jurkat cell. SABRs comprising mismatched or irrelevant antigens may not be recognized by the expressed TCR and may not activate.

[0203] Some embodiments herein relate to a method for antigen discovery, the method comprising: expressing any of the SABRs described herein in at least one reporter cell, wherein the at least one reporter cell produces a measurable signal upon a signal transduction event that occurs upon binding of an antigen receptor to the antigen presenting domain, incubating the at least one reporter cell with an antigen receptor to be tested for binding to the SABR, detecting a presence of a measurable signal in the at least one reporter cell when the antigen receptor binds, and identifying the at least one reporter cell producing the measurable signal, thereby identifying an antigen by associating the SABR in the cell with the reporter, with the antigen receptor, wherein the antigen receptor comprises a soluble molecule.

[0204] Some embodiments herein relate to a method for antigen discovery, the method comprising: expressing any of the SABRs described herein in at least one reporter cell, wherein the reporter cell produces a measurable signal upon a signal transduction event that occurs upon binding of a an antigen receptor to the antigen presenting domain, incubating the at least one reporter cell with an antigen receptor to be tested for binding to the SABR, detecting a presence of a measurable signal in the at least one reporter cell when the antigen receptor binds, and identifying the at least one reporter cell producing the measurable signal, thereby identifying an antigen by associating the SABR in the cell with the reporter, with the antigen receptor, wherein the antigen receptor comprises a soluble molecule, wherein the soluble molecule comprises an antibody.

[0205] Some embodiments herein relate to a method for antigen discovery, the method comprising: expressing any of the SABRs described herein in at least one reporter cell, wherein the reporter cell produces a measurable signal upon a signal transduction event that occurs upon binding of a an antigen receptor to the antigen presenting domain, incubating the at least one reporter cell with an antigen receptor to be tested for binding to the SABR, detecting a presence of a measurable signal in the at least one reporter cell when the antigen receptor binds, and identifying the at least one reporter cell producing the measurable signal, thereby identifying an antigen by associating the SABR in the cell with the reporter, with the antigen receptor, wherein the antigen receptor is expressed on a cell.

[0206] Some embodiments herein relate to a method for antigen discovery, the method comprising: expressing any of the SABRs described herein in at least one reporter cell, wherein the reporter cell produces a measurable signal upon a signal transduction event that occurs upon binding of a an antigen receptor to the antigen presenting domain, incubating the at least one reporter cell with an antigen receptor to be tested for binding to the SABR, detecting a presence of a measurable signal in the at least one reporter cell when the antigen receptor binds, and identifying the at least one reporter cell producing the measurable signal, thereby identifying an antigen by associating the SABR in the cell with the reporter, with the antigen receptor, wherein the antigen receptor is expressed on a cell, and wherein the antigen receptor comprises a TCR expressed on a T cell.

[0207] Some embodiments herein relate to a method for antigen discovery, the method comprising: expressing any of the SABRs described herein in at least one reporter cell, wherein the reporter cell produces a measurable signal upon a signal transduction event that occurs upon binding of a an antigen receptor to the antigen presenting domain, incubating the at least one reporter cell with an antigen receptor to be tested for binding to the SABR, detecting a presence of a measurable signal in the at least one reporter cell when the antigen receptor binds, and identifying the at least one reporter cell producing the measurable signal, thereby identifying an antigen by associating the SABR in the cell with the reporter, with the antigen receptor, wherein the at least one reporter cell comprises a library of cells, wherein the library of cells have numerous different SABRs, and wherein the numerous different SABRs can bind to different antigen receptors.

[0208] Some embodiments herein relate to a method for antigen discovery, the method comprising: expressing any of the SABRs described herein in at least one reporter cell, wherein the reporter cell produces a measurable signal upon a signal transduction event that occurs upon binding of a an antigen receptor to the antigen presenting domain, incubating the at least one reporter cell with an antigen receptor to be tested for binding to the SABR, detecting a presence of a measurable signal in the at least one reporter cell when the antigen receptor binds, and identifying the at least one reporter cell producing the measurable signal, thereby identifying an antigen by associating the SABR in the cell with the reporter, with the antigen receptor, wherein the antigen receptor comprises numerous antigen receptors

[0209] Some embodiments herein relate to a method for antigen discovery, the method comprising: expressing any of the SABRs described herein in at least one reporter cell, wherein the reporter cell produces a measurable signal upon a signal transduction event that occurs upon binding of a an antigen receptor to the antigen presenting domain, incubating the at least one reporter cell with an antigen receptor to be tested for binding to the SABR, detecting a presence of a measurable signal in the at least one reporter cell when the antigen receptor binds, and identifying the at least one reporter cell producing the measurable signal, thereby identifying an antigen by associating the SABR in the cell with the reporter, with the antigen receptor, wherein numerous different SABRs are expressed and one determines which SABR a particular antigen receptor binds to (“antigen discovery”) by monitoring the measurable signal and identifying which SABR is in the cell that exhibited the measurable signal.

[0210] Some embodiments herein relate to a method for antigen discovery (and/or antigen receptor discovery), the method comprising: expressing any of the SABRs described herein in at least one reporter cell, wherein the reporter cell produces a measurable signal upon a signal transduction event that occurs upon binding of an antigen receptor to the antigen presenting domain, incubating the at least one reporter cell with an antigen receptor to be tested for binding to the SABR, detecting a presence of a measurable signal in the at least one reporter cell when the antigen receptor binds, and identifying the at least one reporter cell producing the measurable signal, thereby identifying an antigen by associating the SABR in the cell with the reporter, with the antigen receptor, wherein more than one antigen receptor is present and one determines which antigen receptor binds to a particular SABR.

[0211] Some embodiments herein relate to a method for antigen discovery (and/or antigen receptor discovery_, the method comprising: expressing any of the SABRs described herein in at least one reporter cell, wherein the reporter cell produces a measurable signal upon a signal transduction event that occurs upon binding of a an antigen receptor to the antigen presenting domain, incubating the at least one reporter cell with an antigen receptor to be tested for binding to the SABR, detecting a presence of a measurable signal in the at least one reporter cell when the antigen receptor binds, and identifying the at least one reporter cell producing the measurable signal, thereby identifying an antigen by associating the SABR in the cell with the reporter, with the antigen receptor, wherein more than one antigen receptor and more than one SABR are present.

[0212] Some embodiments herein relate to a method for antigen discovery, the method comprising: expressing any of the SABRs described herein in at least one reporter cell, wherein the reporter cell produces a measurable signal upon a signal transduction event that occurs upon binding of a an antigen receptor to the antigen presenting domain, incubating the at least one reporter cell with an antigen receptor to be tested for binding to the SABR, detecting a presence of a measurable signal in the at least one reporter cell when the antigen receptor binds, and identifying the at least one reporter cell producing the measurable signal, thereby identifying an antigen by associating the SABR in the cell with the reporter, with the antigen receptor, wherein the reporter cells comprise NFAT-GFP-Jurkat cells.

[0213] Some embodiments herein relate to a method for antigen discovery, the method comprising: expressing any of the SABRs described herein in at least one reporter cell, wherein the reporter cell produces a measurable signal upon a signal transduction event that occurs upon binding of a an antigen receptor to the antigen presenting domain, incubating the at least one reporter cell with an antigen receptor to be tested for binding to the SABR, detecting a presence of a measurable signal in the at least one reporter cell when the antigen receptor binds, and identifying the at least one reporter cell producing the measurable signal, thereby identifying an antigen by associating the SABR in the cell with the reporter, with the antigen receptor, wherein the reporter cells comprise NFAT-GFP-Jurkat cells, cells of any T cell line, cells of any B cell line, cells of any NK cell line, monocytic cell line, or myeloid cell line

[0214] Some embodiments herein relate to a method for antigen discovery, the method comprising: expressing any of the SABRs described herein in at least one reporter cell, wherein the reporter cell produces a measurable signal upon a signal transduction event that occurs upon binding of a an antigen receptor to the antigen presenting domain, incubating the at least one reporter cell with an antigen receptor to be tested for binding to the SABR, detecting a presence of a measurable signal in the at least one reporter cell when the antigen receptor binds, and identifying the at least one reporter cell producing the measurable signal, thereby identifying an antigen by associating the SABR in the cell with the reporter, with the antigen receptor, wherein the measureable signal comes from expression of a detectable marker.

[0215] Some embodiments herein relate to a method for antigen discovery, the method comprising: expressing any of the SABRs described herein in at least one reporter cell, wherein the reporter cell produces a measurable signal upon a signal transduction event that occurs upon binding of a an antigen receptor to the antigen presenting domain, incubating the at least one reporter cell with an antigen receptor to be tested for binding to the SABR, detecting a presence of a measurable signal in the at least one reporter cell when the antigen receptor binds, and identifying the at least one reporter cell producing the measurable signal, thereby identifying an antigen by associating the SABR in the cell with the reporter, with the antigen receptor, wherein the reporter cells expressing the measurable signal are identified using flow cytometry.

[0216] Some embodiments herein relate to a method for antigen discovery, the method comprising: expressing any of the SABRs described herein in at least one reporter cell, wherein the reporter cell produces a measurable signal upon a signal transduction event that occurs upon binding of a an antigen receptor to the antigen presenting domain, incubating the at least one reporter cell with an antigen receptor to be tested for binding to the SABR, detecting a presence of a measurable signal in the at least one reporter cell when the antigen receptor binds, and identifying the at least one reporter cell producing the measurable signal, thereby identifying an antigen by associating the SABR in the cell with the reporter, with the antigen receptor, wherein the antigen receptor cells comprise cells expressing orphan T-cell receptors (TCR).

[0217] Some embodiments herein relate to a method for antigen discovery, the method comprising: expressing any of the SABRs described herein in at least one reporter cell, wherein the reporter cell produces a measurable signal upon a signal transduction event that occurs upon binding of a an antigen receptor to the antigen presenting domain, incubating the at least one reporter cell with an antigen receptor to be tested for binding to the SABR, detecting a presence of a measurable signal in the at least one reporter cell when the antigen receptor binds, and identifying the at least one reporter cell producing the measurable signal, thereby identifying an antigen by associating the SABR in the cell with the reporter, with the antigen receptor, wherein the antigen receptor comprises an expressed orphan T-cell receptors (TCR).

[0218] Some embodiments herein relate to a method for antigen discovery, the method comprising: expressing any of the SABRs described herein in at least one reporter cell, wherein the reporter cell produces a measurable signal upon a signal transduction event that occurs upon binding of a an antigen receptor to the antigen presenting domain, incubating the at least one reporter cell with an antigen receptor to be tested for binding to the SABR, detecting a presence of a measurable signal in the at least one reporter cell when the antigen receptor binds, and identifying the at least one reporter cell producing the measurable signal, thereby identifying an antigen by associating the SABR in the cell with the reporter, with the antigen receptor, wherein the at least one reporter cell expresses a genetically encoded antigen or antigenic epitope.

[0219] Some embodiments herein relate to a method for antigen discovery, the method comprising: expressing any of the SABRs described herein in at least one reporter cell, wherein the reporter cell produces a measurable signal upon a signal transduction event that occurs upon binding of a an antigen receptor to the antigen presenting domain, incubating the at least one reporter cell with an antigen receptor to be tested for binding to the SABR, detecting a presence of a measurable signal in the at least one reporter cell when the antigen receptor binds, and identifying the at least one reporter cell producing the measurable signal, thereby identifying an antigen by associating the SABR in the cell with the reporter, with the antigen receptor, wherein the at least one reporter cell expresses a genetically encoded antigen or antigenic epitope, and further comprising identifying the genetically encoded antigen or antigenic epitope by DNA sequencing.

### Cell Libraries

[0220] Each of the embodiments provided herein with regard Signaling and Antigen-Presenting Bifunctional Receptors can be used within the present embodiments described herein with regard to Cell Libraries.

[0221] Some embodiments herein relate to a library comprising: any of the SABRs described herein, and at least one candidate antigen receptor.

[0222] Some embodiments herein relate to a library comprising: any of the SABRs described herein, and at least one candidate antigen receptor, wherein the at least one antigen receptor is expressed on a cell, wherein the cell is an antigen receptor cell. Some embodiments herein relate to a library comprising: any of the SABRs described herein, and at least one candidate antigen receptor, wherein the at least one antigen receptor is expressed on a cell, wherein the cell is a reporter cell.

[0223] Some embodiments herein relate to a library comprising: any of the SABRs described herein, and at least one candidate antigen receptor, wherein the at least one antigen receptor is expressed on a cell, wherein the SABR is expressed on a reporter cell, such that the cell provides a detectable marker upon binding of the SABR to the antigen receptor.

[0224] Some embodiments herein relate to a library comprising: any of the SABRs described herein, and at least one candidate antigen receptor, wherein the at least one antigen receptor is expressed on a cell, wherein the reporter cell comprises NFAT-GFP-Jurkat cells.

[0225] Some embodiments herein relate to a library comprising: any of the SABRs described herein, and at least one candidate antigen receptor, wherein the at least one antigen receptor is expressed on a cell, wherein the at least one antigen receptor is expressed on a cell, wherein the cell is an antigen receptor cell, and wherein the antigen receptor cell comprises T cells comprising TCR.

[0226] Some embodiments herein relate to a library comprising: any of the SABRs described herein, and at least one candidate antigen receptor wherein the at least one antigen receptor is expressed on a cell, wherein the cell is an antigen receptor cell, and wherein the antigen receptor cell comprises a cell expressing orphan TCR.

[0227] FIG. 2C illustrates a schematic demonstrating the use of a SABR library for antigen discovery according to various embodiments herein. In some embodiments, reporter cells, such as NFAT-GFP-Jurkat cells expressing a library of SABRs, can be used to uncover antigen specificities. In some embodiments, each cell 210, 212, 214, 216, 218, 220, 222, 224, and 226 in the SABR library expresses a unique genetically encoded antigen or antigenic epitope, which can be identified by DNA sequencing. In some embodiments, the SABR library can be co-incubated with T cells with unknown specificities, or T cell lines expressing a TCR with unknown specificity. In some embodiments, cells producing a signal, such as GFP+ cells 210, 216, and 222 can be sorted and the antigenic epitopes can be sequenced to determine the cognate antigen of the given T cell or TCR.

### Therapeutic Methods

[0228] Each of the embodiments provided above with regard Signaling and Antigen-Presenting Bifunctional Receptors can be used within the present embodiments described herein with regard to Therapeutic Methods.

[0229] Some embodiments herein relate to a method for initiating a therapeutic response, the method comprising: transducing a therapeutic cell with any one or more of the SABRs described herein, and administering the therapeutic cell to a subject in need of treatment, wherein the SABR directs a cellular response in the subject upon binding to an antigen receptor in the subject. Some embodiments herein relate to a method for initiating a therapeutic response, the method comprising: transducing a therapeutic cell with any one or more of the SABRs described herein, and administering the therapeutic cell to a subject in need of treatment, wherein the SABR directs a cellular response in the subject upon binding to an antigen receptor in the subject, and wherein the therapeutic cell comprises CD8+ T cells, CD4+ T cells, Regulatory T cells, B cells, NK cells, Dendritic cells, Macrophages, Monocytes, or any hematopoietic cells including, for example hematopoietic stem cells, progenitors, lymphoid and myeloid cells.

[0230] Some embodiments herein relate to a method for initiating a therapeutic response, the method comprising: transducing a therapeutic cell with any one or more of the SABRs described herein, and administering the therapeutic cell to a subject in need of treatment, wherein the SABR directs a cellular response in the subject upon binding to an antigen receptor in the subject, and wherein the cellular response results in one or more of: cell mediated cytotoxicity, release of inflammatory cytokines, release of suppressive cytokines, direct suppression of target cells, release of anti-inflammatory cytokines, induction of pro-proliferative signals, induction of anti-proliferative signals, induction of apoptosis, induction of cell exhaustion markers, or direct target cell activation.

[0231] Some embodiments herein relate to a method for initiating a therapeutic response, the method comprising: transducing a therapeutic cell with any one or more of the SABRs described herein, and administering the therapeutic cell to a subject in need of treatment, wherein the SABR directs a cellular response in the subject upon binding to an antigen receptor in the subject, and wherein the therapeutic cell destroys a pathogenic T cell.

[0232] Some embodiments herein relate to a method for initiating a therapeutic response, the method comprising: transducing a therapeutic cell with any one or more of the SABRs described herein, and administering the therapeutic cell to a subject in need of treatment, wherein the SABR directs a cellular response in the subject upon binding to an antigen receptor in the subject, and wherein the therapeutic cell activates a target T cell.

[0233] Some embodiments herein relate to a method for initiating a therapeutic response, the method comprising: transducing a therapeutic cell with any one or more of the SABRs described herein, and administering the therapeutic cell to a subject in need of treatment, wherein the SABR directs a cellular response in the subject upon binding to an antigen receptor in the subject, and wherein the therapeutic cell suppresses a pathogenic T cell.

[0234] Some embodiments herein relate to a method for treating a patient comprising introducing into the patient a therapeutic T-cell comprising an extracellular peptide-MHC complex, the peptide-MHC complex comprising an antigen presenting domain linked to a signal transduction domain, wherein the antigen presenting domain comprises an MHC.

### Therapeutic T Cell Compositions

[0235] Each of the embodiments provided herein with regard Signaling and Antigen-Presenting Bifunctional Receptors can be used within the present embodiments described herein with regard to Therapeutic T Cell Compositions.

[0236] Some embodiments herein relate to a composition comprising: a therapeutic T-cell comprising any of the SABRs described herein.

### Additional SABR Compositions

[0237] Provided in this section are additional options for arrangements and combinations of SABRs and uses thereof.

[0238] Some embodiments herein relate to a SABR comprising: an extracellular binding domain comprising an MHC and a peptide epitope, a transmembrane domain, and a cytoplasmic signaling domain.

### Cell-based Platform for T cell Antigen Discovery

[0239] Each of the embodiments provided herein with regard Signaling and Antigen-Presenting Bifunctional Receptors can be used within the present embodiments described herein with regard to a Cell-Based Platform for T cell Antigen Discovery.

[0240] Some embodiments herein relate to chimeric SABRs in a novel cell-based platform for TCR antigen discovery. In some embodiments, SABRs present an extracellular peptide-MHC complex and induce intracellular signaling via a TCR-like signal upon binding with a cognate TCR. Some embodiments herein relate to antigen discovery using SABR libraries to screen, for example, thousands of antigenic epitopes. This platform was verified by identifying the targets recognized by public TCRs of known specificities. Moreover, this approach can be extended for personalized neoantigen discovery. In some embodiments, the antigen discovery platform described herein can provide a scalable and versatile way to develop novel targets for immunotherapy.

[0241] A CD8+ T cell encodes a unique surface T Cell Receptor (TCR) that recognizes 8-12 residue long peptide epitopes presented on class I MHC molecules, also known as Human Leukocyte Antigens (HLA) in humans. When a TCR complex binds cognate peptide-MHC (pMHC), the CD3ζ chains associated with the TCR complex dimerize to initiate downstream signaling. Multiple signaling cascades are activated, leading to rapid gene expression driven by the transcription factors NF-κB, AP-1, and NFAT7. In CD8+ T cells, TCR signaling induces expression of early activation markers (CD69 and CD107a), release of cytotoxic granules, and secretion of cytokines (IFNγ, IL2, and TNFα), ultimately killing the target cell. The interaction of cognate TCR and pMHC complexes generates a high degree of specificity towards a target antigen. T cells can recognize epitopes presented by tumor cells and infiltrate the tumor microenvironment. Antitumor T cells respond to two kinds of tumor-derived epitopes: 1) Public or private epitopes originating from non-mutated, tissue specific antigens or cancer-testis antigens, and 2) Private neoantigens originating from non-synonymous mutations. Both endogenous antigens and neoantigens can be used to provide targets of immunotherapies.

[0242] One of the bottlenecks in the field of tumor immunology is the identification of the antigen recognized by a particular antitumor CD8+ T cell. Several techniques have been developed to identify cognate antigens for T cells. The most common approach uses pMHC multimers to identify antigen-specific T cells by flow cytometry. However, antigen discovery using pMHC multimers requires ab initio knowledge of the antigenic landscape, is not scalable beyond 10³ antigens, but can identify multiple antigenic specificities simultaneously. This approach has been used to discover public tumor antigens as well as private neoantigens. One approach uses degenerate libraries of covalently linked. Following multiple rounds of selection, outgrowth, sequencing, and referencing tumor exome data, the cognate antigen of the TCR is identified. However, this approach is technically challenging because of the requirement of soluble TCR, does not represent the physiological TCR-pMHC interaction, but is antigen-agnostic and scalable to 106-108 epitopes. These limitations underscore the need for new techniques for T cell antigen discovery.

[0243] Some embodiments herein thus relate to novel antigen discovery techniques to address the unmet need. In some embodiments, cell-based platforms for T cell antigen discovery are presented. In some embodiments, by combining antigen presentation by pMHC complexes with intracellular signaling, SABRs allow identification of a successful TCR-pMHC interaction. Some embodiments relate to TCR antigen discovery using SABR libraries and its use for known public TCRs. Some embodiments relate to adaptation of SABR libraries for a personalized neoantigen-directed approach. Some embodiments describe a flexible and scalable method for T cell antigen discovery.

### Additional Contemplated Embodiments

[0244] Each of the embodiments provided above with regard Signaling and Antigen-Presenting Bifunctional Receptors can be used within the present embodiments described herein with regard to Additional Contemplated Embodiments.

[0245] Various embodiments described herein address the limitations of the TCR-Antigen-MHC interaction through the introduction of SABRs. The use of SABRs, as discussed herein, allows for the utilization of TCR-Antigen-MHC interactions for various functions.

[0246] In some embodiments, a function enabled by the SABRs disclosed herein comprises uncovering T cell antigenic specificities in cancers, infectious diseases, and autoimmune diseases. T cell-mediated responses to cancers target multitude of antigens expressed on cancer cells. Knowing the antigens that are targeted is immensely useful for immunotherapy approaches to treat cancers. There are several technologies to uncover epitopes that are targeted by T cells. The most widely used technologies are based on using MHC-peptide-multimers. The use of MHC multimers has several drawbacks—it is labor intensive and not easily scalable, it is not trivial for class II MHC-peptide complexes, and it is not sensitive towards low-affinity interactions. Yeast display has also been tested for TCR antigen discovery but suffers from several drawbacks as well. Yeast display relies on using peptide-MHC-b2microglobulin single chain trimers (SCTs), which mimic antigen presentation and link the antigen genetically to MHC. However, the use of SCT Yeast display technology requires production of soluble TCR molecules, which is not robust, and which cannot be scaled to multiple TCRs easily. Moreover, because yeast lacks endogenous MHC, the SCTs may not fold correctly and may not represent physiological TCR binding. Other technologies that are antigen-directed require prior knowledge of antigenic epitopes from patient samples, or that require expansion of patient T cells that may bias the antigen specificity, or that require large amounts of patient samples that may not be available. The SABR technology described here uses an unbiased approach that will use a library of target cells that are recognized by a given T cell or a TCR. SABRs allow scalability of this approach to, for example, over 10⁶ epitopes and virtually all MHC alleles, including class I and class II alleles, does not require soluble TCR production, allows for low-affinity TCR-pMHC interactions, and can be used without patient tumor samples.

[0247] In some embodiments, another function enabled by the SABRs disclosed herein comprises studying T cell receptor cross-reactivity and heteroclitic ligands. TCRs display considerable promiscuity in recognition of the variants of their cognate epitope. The study of TCR cross-reactivity is important to understand the safety and efficacy of a TCR or a T cell bearing a particular TCR. In cancer immunotherapy, the knowledge of the cross-reactivity of a TCR can help understand the off-target or on-target, but unintended effects of using that TCR therapeutically without undesirable side effects. In immunotherapy for viruses such as HIV, the knowledge of TCR cross-reactivity can help understand the propensity of immune escape of the pathogen from that TCR. The current technologies of studying TCR cross-reactivity are based either on low-throughput methods using individual variant peptides, or on yeast display technologies that are laborious and require production of soluble TCRs. In some embodiments, the SABR technology described herein allows for construction of libraries of, for example, 10³-10⁶ antigenic epitope variants for any given MHC-peptide combination, and for subsequent identification of variants that are recognized, without the requirement for soluble TCR production. In addition, this approach can be used to identify variants of a given epitope that may have different binding properties, such as heteroclitic ligands with higher affinity and antagonists.

[0248] In some embodiments, yet another function enabled by the SABRs disclosed herein comprises inducing specific T cell responses. Vaccination approaches that elicit T cell responses require presentation of antigen epitopes to T cells and subsequent stimulation of those T cells. Professional antigen presenting cells (APCs) process endogenous or foreign antigens and present them to T cells. Antigen-specific immunity can be elicited by using live attenuated or inactive viruses, soluble antigenic proteins, or by using vectors. However, in these approaches, the antigenic epitopes are processed by the natural cellular machinery, and hence there is no control over whether a given epitope will elicit a strong immune response. To elicit a response to a given epitope, it is expressed in APCs via expression cassettes for entire proteins of via tandem minigenes encoding epitopes. Single chain trimers can also be used to express a given MHC-peptide complex on APCs to elicit an immune response. As single chain trimers cannot signal in the APC, they cannot manipulate how the APC will stimulate T cells. In some embodiments, the SABRs described herein can be coupled to specific signaling molecules that can allow the APCs to secrete cytokines and activate T cells that recognize them. In some embodiments, SABRs can be configured to elicit immunosuppressive cytokines in APCs, which can cause suppression of particular responses.

[0249] In some embodiments, yet another function enabled by the SABRs disclosed herein comprises eliminating T cell specificities. Pathogenic T cell clonal specificities may play a central role in T cell leukemias and autoimmune disorders. In T cell leukemia, the outgrown and transformed clones can be specifically targeted based on the antigenic epitopes recognized by them. In autoimmune disorders, T cell clones that are autoreactive can also be targeted based on their cognate epitopes Eliminating T cell clones based on their antigenic specificities allows for precise targeting with minimal off-target effects. The approaches tested so far have relied on monoclonal antibodies that recognize particular TCR variable regions. Targeting specific TCR variable regions provides precision but does not allow for targeting TCRs that may comprise of different variable regions while recognizing the same antigenic specificity. In addition, this approach can result in depletion of all TCRs comprising of a given variable region without regard for their specificities. In some embodiments, SABRs can allow for targeting of TCRs based on their antigen specificity. T cells transduced with SABRs presenting a given epitope can be used therapeutically to eliminate pathogenic T cell specificities. In addition, the identification of antigens that can be recognized by clonal T cells can be used for developing SABRs even without the knowledge of their natural cognate antigen. In some embodiments, the drawbacks of existing technologies can be overcome by linking signaling and antigen presentations through SABRs. By combining antigen presentation and signaling, SABRs allow a robust, scalable, high-throughput, and sensitive approach to initiate signal transduction in cells recognized by given TCRs, therefore allowing a functional output to be generated by them.

[0250] In some embodiments, MHC molecules present peptide epitopes on a cell surface for recognition by T cells. In their native form, MHC molecules lack signaling domains, and cannot transduce any signal into the antigen presenting cell. Some embodiments described herein relate to a chimeric construct (e.g. SABR) that adds a signal transduction domain to the intracellular end of MHC molecules. In some embodiments, these SABRs are able to present antigen, and induce an intracellular signal upon recognition by a T cell. In some embodiments, SABRs have two or more distinct functional parts including, for example, including one or more antigen recognition domains that are based on MHC molecules, which present peptide epitopes to T cells. In some embodiments, these can either be genetically encoded and covalently linked to the MHC molecule or expressed in the cell and presented naturally by the MHC molecule. Additionally, in some embodiments, the SABRs comprise one or more signal transduction domains that induce an intracellular signal to induce a transcriptional response upon binding of the SABRs to their cognate T cells. The SABRs constructs can be used for multiple different purposes, such as for antigen-discovery in cancer, autoimmune disorders, and infectious diseases, for immunotherapeutic approaches to eliminate T cell specificities, for inducing antigen specific cytokine signaling.

[0251] FIG. 3A illustrates a schematic of the T cells and target cells used to demonstrate the function of SABRs according to various embodiments herein. In some embodiments, class I SABRs 302 can be constructed based on the two constructs shown in FIG. 1C. These include the SCTR constructs, which consist of the peptide epitope covalently linked to MHC, and the SCDR constructs, which can, in some embodiments, be forced to present a peptide epitope that is not genetically linked to MHC. In some embodiments, the SCTR constructs can be constructed to express, for example, either A2-NYESO (a cancer-specific MHC-antigen combination) or B27-KK10 (an HIV-specific MHC-antigen combination). In some embodiments, the SCDR constructs for A2 and B27 can be constructed and a peptide can be used to present, for example, either NYESO or KK10 antigen. In some embodiments, for example, NFAT-GFP-Jurkats, can be transduced with the SCTR constructs or with SCDR constructs and pulsed with peptide antigen as reporter cells 304. In some embodiments, the reporter cells 304 can be transduced with Jurkat cells 306 expressing, for example, either A2-NYESO-specific TCR or B27-KK10-specific TCR, and the frequency of GFP+ cells can be measured with flow cytometry.

[0252] As shown in FIG. 3B, NFAT-GFP-Jurkats may express GFP only upon specific recognition of MHC-antigen by SABRs. FIG. 3C illustrates a similar assay using NFAT-GFP-Jurkat cells expressing B27-KK10-SCTR constructs according to various embodiments. In some embodiments, Jurkat cells can be transduced with four different B27-KK10-specific TCRs from four different HIV patients and incubated them with the NFAT-GFP-Jurkat cells. As shown in FIG. 3C, the reporter cells can express GFP upon being recognized by all four TCRs. Therefore, in some embodiments, class I SABRs function in the proposed way discussed above and can be used in a reporter cell line.

[0253] FIG. 4A illustrates a schematic describing the use of various SABR constructs for T cell antigen discovery according to various embodiments herein. FIG. 4B illustrates a schematic describing the use of SCTRs to study TCR cross-reactivity or to identify heteroclitic ligands according to various embodiments herein. In some embodiments, using these approaches, the antigenic reactivities of cancer-specific, pathogen-specific, or autoreactive T cells can be identified. In some embodiments, SABR libraries expressing antigens or antigenic epitopes from cancers, pathogens, normal cellular proteome can be constructed. In some embodiments, these libraries can be used to identify T cell specificities in, for example, cancer immunity, in autoimmune disorders including diabetes and neurodegenerative disorders, in immunity against pathogens, and in vaccine responses (FIG. 4A). In some embodiments, for a given T cell specificity, SABR libraries expressing variants of the cognate epitope can be constructed and used to understand TCR cross-reactivity and to identify heteroclitic ligands (FIG. 4B).

[0254] FIG. 5A illustrates a schematic describing the ability of SABRs to induce toxicity in response to recognition of particular T cell antigenic specificities according to various embodiments. In some embodiments, SABRs can also redirect T cell specificity to target other pathogenic T cells. As SABRs can induce signaling in T cells akin to CARs, they can be used to initiate a cytotoxic response towards T cells that recognize them. In some embodiments, a therapeutic T cell 502 transduced with SABRs recognizing a given antigen can be used to specifically eliminate pathogenic T cells 504 in a specific manner as described in FIG. 5A. In some embodiments, this ability can be tested using a cytotoxicity assay as described in FIG. 5B. In some embodiments, primary T cells can be transduced with two different A2-NYESO-SCTR constructs to allow their use as effector/therapeutic T cells. In some embodiments, Jurkat cells expressing A2-NYESO-, A2-MART1-, or B27-KK10-specific TCR can be used as target cells. In some embodiments, therapeutic T cells and target cells can be co-incubated and the survival of target cells can be measured after 24 hours. As described in FIG. 5B, A2-NYESO-SCTRs may be able to induce cytotoxicity specifically towards target cells expressing A2-NYESO-specific TCR, demonstrating the cytotoxic function of SABRs. In some embodiments, based on these results, SABRs can be used therapeutically to eliminate antigenic specificities from a T cell repertoire. In the case of, for example, autoimmune diseases, the pathogenic T cells may be autoreactive T cells, which can be recognized by the SABR expressing their cognate autoantigen. In the case of, for example, T cell leukemia, the pathogenic T cells may be clonally expanded T cells, which can be recognized by the SABR expressing either their cognate antigen or a heteroclitic ligand recognized by them. In some embodiments, the specificity of SABRs allows them to target particular T cell specificities while not targeting the normal T cell repertoire.

[0255] In summary, in various embodiments described herein, SABRs can be used as a robust, scalable, specific, and versatile way to couple antigen presentation and signaling. In various embodiments, this function can be exploited in several different ways to understand and manipulate T cell specificities.

[0256] In certain embodiments, SABRs can be used for antigen discovery. Current technologies for antigen discovery include MHC multimers, functional assays, yeast display, mass spectrometry, and DNA barcoding/NACS. These technologies have several disadvantages including a lack of scalability, lack of ability to expand to many MHC alleles, need for specialized instrumentation, and lack of robustness. Moreover, all the current technologies focus on cancer-specific T cells, and MHC-I antigens. There is a severe dearth of approaches/strategies to identify MHC-II antigens.

[0257] MHC multimers are produced by synthesizing peptide epitopes and re-folding them with biotinylated MHC molecules. However, MHC multimers are limited to 10-100 antigens at one time are therefore are not scalable. Moreover, making multimers for MHC-II antigens is technically challenging due to their inherent instability. Functional assays such as ELISPOT also rely on synthesizing peptide epitopes and presenting them on target cells. While it has been a popular technology, the scale up to include numerous MHC-I and MHC-II alleles, as well as a broad range of epitopes is complex. Yeast display techniques use MHC-peptide presentation on yeast cell surface followed by staining the yeast using a soluble TCR. Production of soluble TCRs is highly non-robust and time consuming, and therefore not easily scalable. Mass spectrometry techniques identify prospective antigenic epitopes based on mass spectrometry of antigen presenting cells. However, mass spectrometry requires a large amount of tissue, which is difficult to obtain for many diseases such as Type 1 Diabetes. Moreover, it also requires validation based on MHC multimers. Finally, DNA barcoding/NACS uses specialized barcoded MHC multimers that are immobilized on chips or beads. While effective, this technique is limited by the requirement for specialized equipment to capture cells and read their barcode, and by the inability to handle multiple sample at once.

[0258] Some embodiments herein are directed to novel technologies for discovering and validating antigen reactivity of T cells. T cells are an essential part of the adaptive immune system that fights infections and cancers. T cells use their surface TCR to recognize antigenic peptide epitopes presented by MHC proteins. Antigens displayed on MHC can be either from pathogens (e.g. peptides from Influenza virus), from cancerous cells (e.g. MART1/MelanA peptide expressed on Melanoma cells), or from normal cells (e.g. ProInsulin peptide from normal pancreatic cells). T cell responses are protective in their normal form but can be pathogenic if dysregulated.

[0259] T-cells are essential for immunity against viral infections and cancers but can cause autoimmune diseases like Type 1 Diabetes if they become dysfunctional. One of the biggest challenges in studying T cells is in the discovery of the specific protein antigens they recognize. In some embodiments, SABRs can be used to present protein antigens and induce a readable output of a T cell that recognizes them. In some embodiments, this ability of SABRs can solve the challenge of antigen identification and benefit the development of T cell mediated therapies. Some embodiments herein relate to using SABR technology for use in antigen discovery in numerous diseases including, for example, cancers, Type 1 Diabetes, multiple sclerosis, HIV/AIDS, and others. For example, FIG. 19 illustrates antigenic epitopes that, when combined with the SABR technology herein, could be useful in treatment of type 1 diabetes.

[0260] Protective cell responses, such as those towards pathogens or cancers, are manipulated for prevention/therapy via vaccines or immunotherapies. Dysfunctional T cell responses specific for autoantigens can be pathogenic, such as those targeting normal pancreatic cells in Type 1 Diabetes. Two types of T cells mediate the immune response: CD8+ T cells that recognize 8-12 residue long peptides presented on class I MHC (MHC-I) molecules and initiate direct killing of infected or cancerous cells, and CD4+ T cells that recognize 12-17 residue long peptides presented on class II MHC (MHCII) molecules and provide immunologic help to CD8+ T cells. Both CD8+ and CD4+ T cells play important roles in protective and pathogenic immunity. Understanding the antigens targeted by these cells is an important factor for manipulating these responses. There is a growing need for technologies to identify and validate targeted antigens.

[0261] Various embodiments herein are directed to novel technologies to identify and/or validate antigenic epitopes targeted by a given T cell. In some embodiments, the technology relies on synthetic proteins called SABRs.

[0262] In some embodiments, SABRs perform various functions including presenting an antigenic epitope via an extracellular MHC domain and initiating a readable cellular signal upon recognition of that epitope via an intracellular signaling domain. In some embodiments, by combining these two functions, SABRs can present an antigen, and then transduce a signal if a T cell recognizes that antigen. In some embodiments, the transduced signal is converted to a readable output, such as expression of a reporter gene, e.g. GFP, to mark a recognized cell.

[0263] In some embodiments, the various abilities of SABRs described herein can be used to screen for or validate reactivity to a given antigen, similar to ELISPOT assays. Example uses of this strategy according to various embodiments include monitoring vaccine/disease induced T cell responses in Influenza infection and screening for pathogenic autoreactive T cells in Type 1 Diabetes. Alternatively, in some embodiments, libraries of SABRs presenting numerous antigens can be constructed to identify antigens recognized by T cells of unknown specificity. Example uses of this strategy according to various embodiments include identification of tumor antigens recognized by tumor infiltrating lymphocytes and identification of neoantigen-specific T cell responses in cancer patients.

[0264] In accordance with various embodiments herein, The SABR technologies present major advantages over existing technologies including scalability, ease of use, ability to identify MHC-II antigens, and easier commercialization. Therefore, in some embodiments, SABR technology can be used into a commercial method or kit that can enable T cell antigen discovery, diagnostics, and validation for infectious diseases, cancers, and autoimmune diseases. In some embodiments, the SABR technology can be commercialized include pre-packaged lentiviral vectors to express SABRs and cell-based libraries expressing SABRs.

### Advantages of SABR Technology

[0265] In some embodiments, the SABR library technology described herein has multiple advantages. In some embodiments, the SABR libraries described herein can be built at a flexible scale, from, for example, 1 to 10⁶ antigens or more, 100, 200, 300, 400, 1000, or more antigens in a library, depending on the disease in question. In some embodiments, the library can include hundreds of antigens for identifying a full protein's epitope, a couple of thousand antigens for diseases (neoantigen, listeria), or hundreds of thousands of antigens for broad identification

[0266] Moreover, in some embodiments, this scale up/down can be performed in a standard immunology laboratory without the need for specialized equipment. SABR libraries can also be built for any given number of MHC alleles, making it easier to toggle between universal or patient-specific antigen libraries. Additionally, in some embodiments, the intended product and its use is in a format that requires routine laboratory procedures. Therefore, the turnaround time for using the product can be as low as 3-5 days. Furthermore, unlike yeast display or DNA barcoding, the SABR technology can be used on multiple samples at a time, increasing the throughput. Finally, in some embodiments, SABR libraries can be built for both MHC-I and MHC-II antigens, unlike the current technologies, which are restricted largely to MHC-I antigens. In some embodiments, this versatility allows the use of the SABR technology to a large number of autoimmune diseases.

[0267] In some embodiments, The SABR technology may have a significant cost advantage over other approaches. In some embodiments, the implementation of the technology does not require the use of any specialized equipment that a standard immunology laboratory would not have. For instance, in some embodiments, a flow cytometry-based cell sorter and access to Illumina sequencing facilities is sufficient to implement the technology in an academic/industrial laboratory. Current technologies are limited by the need for specialized equipment, for instance, access to Mass Spectrometer (MS), or specialized chips for DNA barcoding/NACS. Also, in some embodiments, unlike other technologies, the SABR technology does not require synthesizing any specialized reagents that are critical to its implementation. For example, yeast display technology requires synthesizing a soluble TCR, which is highly non-robust and requires time consuming/expensive protein purification. In some embodiments, SABRs are used in simple cell-based assays which can be performed in a general BSL2 laboratory setting. In some embodiments, the SABR technology offers a higher throughput because of its ability to process multiple samples at once. Most of the current technologies can handle only one patient sample at a time.

[0268] In some embodiments, the SABR technology can be manufactured on a mass scale. In some embodiments, the number of antigens that can be encoded in the library can be scaled up/down as per the requirements that are diseases/user specific. For example, a library for cancer neoantigens for patient-specific screening may encode for 6000 peptides, whereas a universal library for multiple class I HLA alleles may have ˜10⁶ peptides. In some embodiments, the scalability at this level is dependent on large scale oligonucleotide synthesis. In some embodiments, a given SABR library, for instance, can be around 10⁵-10⁶ cells. In some embodiments, this number can be scaled up relatively easily, similar to commercially available cell lines.

[0269] Any one or more of the embodiments described herein can be combined with another one or more of the embodiments described below. Any one or more of the compositions described below can be combined or substituted into any one of the methods and/or mechanisms described below.

### EXAMPLES

### Example 1

### SABRs, Peptide Fusion, Signaling Domain-MHC, MHC-Peptide Antigen

[0270] T cell activation upon recognizing a target antigen induces detectable gene expression. However, as MHC molecules lack signaling domains, detection of recognized APCs is challenging. Fusing an intracellular signaling domain to pMHC complexes enables signal transduction. Chimeric receptors called SABRs were constructed. The extracellular domain of a SABR was a covalently linked peptide-β2microglobulin-MHC trimer, fused to an intracellular CD3ζ signaling domain with a CD28 co-stimulatory domain. Two variations of SABRs, SABR-F and SABR-E, were constructed which contained the entire MHC molecule or only the extracellular part of the MHC molecule respectively, as seen in FIG. 6A. FIG. 6A illustrates schematics showing the SABR-F and SABR-E constructs according to various embodiments. SABR-F 600A contains the transmembrane domain 602A from HLA, whereas SABR-E 600B contains the transmembrane domain 602B from CD3ζ. The two horizontal lines indicate two leaflets of the plasma membrane. FIG. 6B illustrates a bar graph showing, on the Y-axis, % GFP+ cells at 8 hours in NFAT-GFP-Jurkats transduced with A2-MART1-SABRs and co-cultured with Jurkat cells transduced with TCRs. Co-culture assays were performed using 50,000 target cells and 50,000 effector cells. Within FIG. 6B, bars indicate mean±sd, n=12.

[0271] Upon interaction with a TCR, SABRs presenting its cognate antigen can induce an intracellular signal. FIG. 7A illustrates schematics demonstrating SABRs and TCR-pMHC specific signaling, with single chain trimer (SCT) and antigen (Ag). Within FIG. 7A, dotted lines indicate Gly-Ser linkers. An SCT without a signaling domain will not induce an intracellular signal in an antigen presenting cell when recognized by a TCR. Similarly, a SABR presenting an irrelevant antigen will not induce an intracellular signal when recognized by a TCR. However, a SABR presenting a cognate antigen will induce an intracellular signal when recognized by a TCR.

[0272] To detect the signal induced by SABRs, NFAT-GFP-Jurkat cells were used, which express GFP upon receiving a signal via CD3ζ. NFAT-GFP-Jurkat cells were transduced with SABRs presenting the EAAGIGILTV epitope (from the MART1 protein) on HLA-A*0201 (hereafter known as A2-MART1-SABR) or the KRWIILGLNK epitope (KK10, from the HIV-1 Gag protein) from HIV-1 on HLA-B*2705 (hereafter known as B27-KK10-SABR). NFAT-GFP-Jurkat cells were co-incubated and transduced with Jurkat cells expressing TCRs and GFP expression was measured by flow cytometry after 8 hours. Specifically, F5 (recognizes A2-MART1), EC27 (recognizes B27-KK10), SL9 (recognizes A2-SLYNTVATL) TCRs or untransduced Jurkat cells were used. Robust GFP expression was detected only in co-culture assays with the cognate TCR-SABR-F pairs. FIG. 7C illustrates GFP expression by SABR transduced NFAT-GFP-Jurkat cells upon co-culture with TCR-transduced Jurkat cells. Within FIG. 7B, the Y-axis shows % GFP+ cells in co-culture assays performed with 10,000 effector and 10,000 target cells at 8 hours after co-culture. Within FIG. 7C, bars indicate mean±sd, n=3. FIG. 7B illustrates representative flow cytometry plots from assays of FIG. 7C. Within FIG. 7B, frequency of GFP+ cells are indicated as a percentage.

[0273] The SABR-F construct showed higher signal than SABR-E construct, and therefore, was used for further experiments. To test if SABRs can detect T cell specificities in a polyclonal population, a number of Jurkat cells expressing F5 TCR were titrated with untranduced Jurkat cells and co-incubated them with NFAT-GFP-Jurkat cells expressing A2-MART1-SABR. SABR signaling was titratable and sensitive enough to detect at least as low as 10 F5+ Jurkat cells mixed with 10,000 mock-transduced Jurkat cells.

[0274] FIG. 7D illustrates a graph of detection of low cell numbers by SABRs. Within FIG. 7D, the Y-axis shows number of GFP+ cells in co-culture assays performed with 10,000 effector and 10,000 target cells at 8 hours after co-culture. The X-axis shows the number of F5+ Jurkat cells mixed with untransduced Jurkat cells. Within FIG. 7D, bars indicate values for n=1. FIG. 7E illustrates a timecourse of GFP expression by A2-MART1-SABR transduced NFAT-GFP-Jurkat cells co-cultured with F5-transduced Jurkat cells. The Y-axis shows % GFP+ cells in co-culture assays performed with 50,000 effector and 50,000 target cells. Within FIG. 7E, dots indicate mean±sd, n=3.

[0275] SABR signaling was also rapid, as GFP signal was detectable within 3 hours of co-incubation, and reached saturation within 6-8 hours, as shown in FIG. 7E and FIG. 7F. FIG. 7F illustrates representative flow cytometry plots from the experiment enumerated in FIG. 7E. Within FIG. 7F, the rectangle in the right bottom corners shows the gate for counting GFP+ cells. The time at which each sample was collected is shown as hours. The frequency of cells in the GFP+0 gate is indicated as a percentage.

[0276] Taken together, these results show that SABRs can induce signaling upon successful and specific TCR-pMHC interaction, allowing identification of recognized APCs.

### Example 2

### SABRs Allow Different Modes of Antigen Presentation

[0277] The endogenous MHC complexes described above present epitopes from newly translated proteins or endocytosed proteins via cross-presentation. To test if SABRs can also utilize these pathways for antigen presentation, an ‘empty’ version of SABRs was constructed that linked β2-microglobulin with A2 or B27 but did not genetically encode for an epitope. FIG. 8A illustrates a schematic showing SCT, SABRs, empty SABRs, and tandem minigenes (TMGs) according to various embodiments, with epitope (EP), signal sequence (S), and MHC class I trafficking signal (MIHC). Within FIG. 8A, numbers 1-6 indicate Gly-Ser linkers. FIG. 8B illustrates SABR vector constructs with a stuffer fragment showing BsmBI sites, and a cloning strategy using double stranded oligonucleotides with encoding the epitope flanked by overlaps according to various embodiments. FIG. 8C illustrates an empty SABR construct according to various embodiments. FIG. 8D illustrates an empty SABR (i.e. no encoded peptide) and endogenously expressed peptide according to various embodiments herein.

[0278] SABR-APCs were incubated with soluble peptides to test presentation and recognition of those peptides. FIG. 8E illustrates a schematic of empty SABRs pulsed with exogenous peptide. NFAT-GFP-Jurkat cells expressing the empty SABRs were incubated with soluble MART1 or KK10 peptides and co-cultured them with Jurkat cells expressing F5 or EC27 TCRs.

[0279] FIG. 8F illustrates a graph showing GFP expression by NFAT-GFP-Jurkats transduced with empty SABRs pulsed with soluble MART1 or KK10 peptides and co-cultured with Jurkat cells transduced with F5 or EC27 TCRs. The Y-axis shows % GFP+ cells in co-culture assays performed with 10,000 effector and 10,000 target cells at 8 hours after co-culture. The bars indicate mean±sd, n=3. Both A2 and B27 empty SABRs induced a signal only in presence of the soluble peptide corresponding to the TCRs, and not in presence of mismatched peptide or in absence of soluble peptide. Moreover, the signal induced by correct peptide-TCR combinations was comparable to the signal induced by the corresponding SABRs presenting covalently linked epitopes.

[0280] Endogenously processed peptide epitopes were tested to determine if they could be presented on ‘empty’ SABRs. Therefore, pentameric TMGs were constructed to express the KK10 epitope along with four irrelevant CMV-derived epitopes. FIG. 8G illustrates a schematic of empty SABRs presenting the newly translated epitopes, with a TMG.

[0281] NFAT-GFP-Jurkat cells were co-transduced with the empty B27-SABR and the KK10 TMG. Following co-incubation with EC27- or F5-expressing Jurkat cells, the ‘empty’ SABRs were able to present the endogenously expressed epitopes and induce specific signaling, as illustrated in FIG. 8H. FIG. 8H illustrates a graph of GFP expression by NFAT-GFP-Jurkats co-transduced with empty B27-SABRs KK10-TMG or transduced with empty B27-SABR and pulsed with KK10 peptide, and co-cultured with Jurkat cells transduced with F5 or EC27 TCRs. The Y-axis shows % GFP+ cells in co-culture assays performed with 50,000 effector and 50,000 target cells at 8 hours after co-culture. Within FIG. 8H, bars indicate mean±sd, n=3. However, the overall signal was lower than the corresponding empty SABRs were pulsed with soluble peptide. These results show that SABRs can present non-covalently linked epitopes generated through endogenous antigen processing and presentation pathways.

[0282] SABRs can present non-covalently linked epitopes generated through endogenous antigen processing and presentation pathways. FIG. 8I illustrates an SCDR construct with a CD3z signal transduction domain according to various embodiments herein. TCR-transduced Jurkat cells were incubated with the SCTR constructs and pulsed with peptide antigen. FIG. 8J illustrates a bar graph showing % GFP+ frequency for various TCR-peptide variations. FIG. 8K illustrates a bar graph showing % GFP+ frequency for various TCR-peptide composition and concentration variations. The results show that, like T cell signaling, SABR signaling is titratable with the amount of peptide presented.

[0283] FIG. 8L illustrates a schematic showing an SCDR construct with a tandem minigene (TMG) antigen according to various embodiments herein. TCR-transduced Jurkat cells were incubated with the SCTR-transduced NFAT-GFP-Jurkat cells transduced with TMG. FIG. 8M illustrates a bar graph showing % GFP+ frequency for various TCR-TMG variations. The results show that SABRs will present endogenous peptide (fragmented protein sequences derived from proteins in the cell) when not directly linked to an antigen.

### Example 3

### SABRs Initiating Bona Fide TCR Signal

[0284] To use SABRs as a therapeutic target, a SABR that binds to a pathogenic T cell in a patient can be identified. The SABR can be cloned into appropriate vectors for immunotherapy, such as lentiviral or retroviral vectors. The patient's own blood can be subjected to leukapheresis followed by isolation of T cells. The T cells can be activated and expanded using commercial methods such as using the OKT3 antibody. The expanded T cells can be transduced with the vector containing the SABR. The transduced cells can be reinfused into the patient as a therapeutic. The expanded T cells expressing the appropriate SABRs should target the pathogenic T cells in the patient and lead to elimination of the pathogenic T cells, leading to disease amelioration.

[0285] This can be done for type 1 diabetes, where a pathogenic T cell can target an insulin-derived epitope in the context of HLA-A2.1 (A2.1-Insulin). In this case, a SABR comprising of HLA-A2.1, presenting the Insulin epitope, and a signaling domain can be cloned into a lentiviral vector. The patient's own T cells can be expanded and transduced with the A2.1-Insulin-SABR expressing vector. The cells can be reinfused into the patient, where they can eliminate the pathogenic T cells that target A2.1-Insulin.

[0286] SABRs use a CD3ζ-CD28 domain for intracellular signaling, similar to chimeric antigen receptors (CARs) and TCRs. Therefore, intracellular signaling ability of SABRs is comparable to TCRs was tested. SABRs ability to induce early activation markers in NFAT-GFP-Jurkat cells was tested. NFAT-GFP-Jurkat cells transduced with the A2-MART1-SABR expressed CD69, an early T cell activation marker, upon co-culture with Jurkat cells transduced with F5 TCR. Co-expression of reporter-driven GFP and endogenous CD69 in cells expressing A2-MART1-SABR, but not the A2-MART1 single chain trimer implies that SABR signaling activates endogenous gene expression, as shown in FIG. 9A. FIG. 9A illustrates representative flow cytometry plots from one experiment of induction of CD69 by SABRs. GFP and CD69 expression in co-culture assays using 10,000 NFAT-GFP-Jurkat cells transduced with the indicated SABRs and 10,000 Jurkat cells transduced with F5 TCR is shown. The frequencies of cells in each gate are indicated as percentage.

[0287] In some embodiments, if SABRs induce a bona fide TCR signal, they can confer cytotoxic capabilities to primary T cells. Activated primary T cells were transduced with A2-MART1-SABR and incubated with CFSE-labeled target cells expressing F5 TCR. Transduced primary T cells lysed Jurkat cells or primary T cells expressing the F5 TCR specifically, as shown in FIG. 9B and FIG. 9C. FIG. 9B illustrates a graph of cytotoxicity induced by SABR-expressing primary T cells against Jurkat cells. The Y-axis shows % survival of CFSE-labeled target cells at 24 hours after co-culture. Cytotoxicity assays were performed with 200,000 SABR-transduced cells and 50,000 TCR-transduced cells. With FIG. 9B, bars indicate mean±sd, n=8. FIG. 9C illustrates a bar graph of cytotoxicity induced by SABR-expressing primary T cells against autologous target cells. The Y-axis shows % survival of target cells at 24 hours after co-culture. Cytotoxicity assays were performed with 200,000 SABR-transduced cells and 50,000 TCR-transduced cells. Within FIG. 9C, bars indicate mean±sd, n=8.

[0288] The antigen sensitivity of SABRs and TCRs was compared. To that end, NFAT-GFP-Jurkat cells were transduced with either empty A2-SABR or F5 TCR and used as effectors. As targets, Jurkat cells transduced with A2-SABR or F5 TCR were used, as shown in FIG. 9D. FIG. 9D illustrates a schematic of the assay to measure antigen sensitivity of A2-SABR 902 and of F5-TCR 904.

[0289] Effectors were co-cultured with their cognate targets in presence of a range of concentrations of the MART1 peptide, and GFP expression was measured. Antigen sensitivity was determined as the concentration of the peptide required for half-maximal signaling. The antigen sensitivity of SABRs was 30-fold lower as compared to TCRs, as shown in in FIG. 9E. FIG. 9E illustrates a plot of antigen sensitivity of SABR and TCR signaling. The Y-axis shows % maximum of % GFP+ cells at 8 hours in co-culture assays using 50,000 SABR- or TCR-transduced cells pulsed with the MART1 peptide. The X-axis shows the concentration of the MART1 peptide used to pulse the cells. Within, FIG. 9E, dots indicate mean±sd, n=3. The dotted horizontal line indicates half-maximal signal.

[0290] Taken together, these results show that SABRs signal similar to TCRs, albeit, in some examples, with lower antigen sensitivity.

[0291] Example 3 above is also an example of SABRs as a therapeutic. For example, in a case where the F5 TCR can be substituted with a pathogenic TCR, such as a TCR recognizing type 1 diabetes antigens. In the therapeutic scenario, a similar experiment to show efficacy can be done where the SABR is presenting the antigen recognized by the pathogenic TCR. Primary T cells expressing the said SABR can then be used to induce cytotoxicity against the pathogenic TCR, and subsequently eliminate them for therapeutic benefit

### Example 4

### Antigen Discovery using SABR Libraries

[0292] In some embodiments, by virtue of genetically linking the peptide epitope with MHC, SABRs can be used to present a defined antigen and to report its successful recognition by a TCR. Therefore, SABR libraries ability to present a large number of epitopes to be used to screen successful TCR-pMHC interactions was tested. A strategy to construct and use SABR libraries for T cell antigen discovery of ‘orphan’ antitumor TCRs with unknown antigens was created. First, a list of target epitopes was generated from an existing database or from tumor exome data followed by prediction of MHC binding. Pooled oligonucleotide libraries encoding for target epitopes were synthesized and cloned into the SABR plasmid, according to FIG. 10A. FIG. 10A illustrates a schematic showing the pipeline to construct custom SABR libraries according to various embodiments. The left panel 1002 shows the procedure to obtain and synthesize a list of epitopes. The right 1004 shows the schematic of the SABR library.

[0293] The SABR libraries were packaged into lentiviral vectors and used to transduce NFAT-GFP-Jurkat cells. NFAT-GFP-Jurkat cells expressing the SABR library were co-cultured with Jurkat cells expressing an ‘orphan’ TCR. GFP+CD69+ NFAT-GFP-Jurkat cells were sorted using fluorescence activated cell sorting (FACS), followed by genomic DNA extraction. The epitope portion of the SABRs was amplified and subjected to high throughput sequencing, as shown in FIG. 10B. FIG. 10B illustrates a schematic showing the co-culture experiment to select cells from the SABR library that are recognized by an orphan TCR according to various embodiments. The left panel 1006 shows a SABR library presenting numerous unique epitopes. The middle panel 1008 shows cells APCs showing reporter expression induced by SABRs presenting the cognate epitope for the orphan TCR. The right panel 1010 shows processing steps of the selected cells.

[0294] The sequencing reads were aligned with the SABR vector backbone using Burrows-Wheeler alignment. Aligned reads were translated to reveal the epitope. The number of reads corresponding to each epitope was counted and reported in a list. A minimum of three replicates of the co-incubation assay were performed. For each replicate, a numerical rank was given to each epitope based on descending order of the number of reads. The rank from three replicates for each assay was averaged and reported as ‘Average Rank’, according to the flowchart in FIG. 10C. FIG. 10C illustrates a flowchart showing the computational analysis pipeline.

[0295] The top ranked epitopes were putative antigens for that TCR and are subsequently validated by constructing individual SABRs presenting each of the epitopes and measuring GFP expression in co-culture assays.

[0296] To demonstrate proof-of-concept of the approach detailed in FIGS. 10A-10C, the SABR libraries ability to identify the cognate antigens of known public TCRs in an unbiased manner was tested. A SABR library encoding 12,055 epitopes presented on HLA-A*0201 (A2-SABR-library) consisting of all known HLA-A*0201-restricted epitopes from the Immune Epitope Database (IEDB) was constructed. The ability of the A2-SABR-library to identify the cognate antigen for two TCRs with known specificities (F5, which recognizes EAAGIGILTV, and SL9, which recognizes SLYNTVATL) was tested. NFAT-GFP-Jurkat cells were transduced with the A2-SABR-library and incubated with Jurkat cells expressing F5 or SL9 TCRs. After 10 hours of co-culture, GFP+CD69+ cells were sorted by FACS, the genomic DNA was extracted, the epitopes were sequenced, and average ranks for each epitope as described were calculated in FIGS. 10A-10C. FIG. 11A illustrates representative flow cytometry plots from one replicate. The A2-SABR library cells were sorted based on reporter gene expression. Co-culture assays using 9 million library cells with 9 million TCR-transduced Jurkat cells were set up. At 10 hours post co-culture, the cells were stained for CD69 and sorted using FACS. The rectangle 1102 in the top right corner of each flow plot shows the gate used for the sort. The frequency of cells in the sort gate is indicated as a percentage.

[0297] The average ranks of each of the epitopes from the SL9 sort against those from F5 sort were plotted. FIG. 11B illustrates a plot of average ranks from the F5 and SL9 sorts. Within FIG. 11B, each dot represents the average rank for a unique epitope as calculated using the procedure described in FIGS. 10A-10C. The Y-axis shows the average rank in the SL9 sort, and the X-axis shows the average rank in the F5 sort. Dots 1104 indicate EAAGIGILTV analogs and dots 1106 indicate SLYNTVATL analogs.

[0298] Six epitopes formed a distinct cluster by their rank in the F5 sort. In the SL9 sort, the top ranks were outliers, but did not form a separate cluster. FIG. 11C illustrates a plot of the average ranks for the top 24 hits from the F5 sort. The epitopes with asterisks indicate EAAGIGILTV analogs. The top six epitopes in the F5 sort were analogs of EAAGIGILTV, indicating successful identification of its antigen, as shown in FIG. 11C.

[0299] FIG. 11D illustrates a plot of the average ranks for the top 24 hits from the SL9 sort. The epitopes with asterisks indicate SLYNTVATL analogs. Six out of the top ten epitopes from the SL9 sort were analogs of SLYNTAVATL, as shown in FIG. 11D. FIG. 11E illustrates a plot of the average ranks for all the EAAGIGILTV analogs in the A2-SABR library. FIG. 11F illustrates a plot of the average ranks for all the SLYNTVATL analogs in the A2-SABR library. Epitopes enriched for their corresponding TCRs were not enriched in mismatched TCRs, as shown in FIGS. 11E and 11F.

[0300] The noise observed in the SL9 sort was presumably due to the higher number of analogs of the SLYNTVATL peptide. The A2-SABR library contains 22 analogs EAAGIGILTV and 60 analogs of SLYNTVATL. A higher number of recognized analogs would lower the average rank for each of the epitopes because of competition among the epitopes.

[0301] The ranks of all the analogs of EAAGIGILTV and SLYNTVATL in the sorts were compared. Six out of twenty-two EAAGIGILTV analogs were identified in the F5 sort, as shown in FIG. 11E, whereas nine out of sixty SLYNTVATL analogs were identified in the SL9 sort, as shown in FIG. 11F. The lack of identification of all the analogs is presumably due to reduced cross-reactivity of the F5 or SL9 TCRs towards them. Indeed, analogs SLYNTIATL (V6I) and SLFNTVATL (Y3F) are documented escape mutations in the SLYNTVATL epitope. Nevertheless, these experiments showed that a SABR library approach could identify the cognate antigen of a TCR by screening thousands of epitopes.

### Example 5

### Personalized Neoantigen Discovery Using SABRs

[0302] SABRs can be implemented to identify candidate T cell receptors (TCRs) for immunotherapy of a tumor. Genomic DNA or RNA from a tumor biopsy would first be sequenced and compared to non-tumor tissue from that patient. Mutations specific to the tumor, termed “neo-antigens”, would be an ideal target for immunotherapy, with the hope of not inducing an immune response anywhere else in the patient's body. A list of these mutations would be generated, filtering out mutations that do not change the amino acid sequence of the patient's proteins. This list would be used to generate a list of short peptides (8-12 amino acids for class I MHC and 12-17 amino acids for class II MHC) that would contain these mutations. The peptide list would then be converted to short oligonucleotide sequences that contain the genetic encoding of those peptides flanked by the nucleotide sequences required for cloning into the SABR vector. These oligonucleotides would be synthesized and then cloned into the vector, using whatever molecular techniques are appropriate. Then that vector will be put in cells, using appropriate techniques. In our case, we used the In-Fusion kit that simplifies Gibson assembly to clone the vector. We generated lentivirus from the resultant plasmid, and infected NFAT-GFP-Jurkat cells. This batch of cells, each expressing a unique SABR, is what we call the SABR library. Overall, each cell contains an MHC molecule linked to a unique short peptide with a tumor mutation, and those MHC molecules are directly linked to a signaling domain, creating a SABR. Enough cells were infected with lentivirus so that the batch of cells cover all mutations in the list of short peptides.

[0303] To use the library to find a patient-specific therapy, the same tumor biopsy would be sequenced for RNA of TCR alpha and beta fragments. These fragments are from T cells that were invading the tumor in an attempt to suppress the tumor, known as tumor-infiltrating lymphocytes (TILs). Individual TCRs from these cells would be reconstructed from the sequencing, a fragment of DNA containing that TCR sequence would be synthesized and cloned into a vector, using whatever techniques are appropriate. Lentivirus of that plasmid would be generated and Jurkat cells (without the NFAT-GFP reporter) would be infected with that virus. The candidate TCR cells would then be co-incubated with the SABR library, for about 8 hours, then sorted on FACS sort for cells that show positive signal. In our case, the reporters were GFP and expression of CD69 cell marker. Genomic DNA from the sorted cells would be extracted, sequenced, and analyzed to determine which specific antigen is recognized by the candidate TCR. In our case, the genomic DNA was extracted with the NucleoSpin column extraction kit, PCR amplified with primers flanking the genetically encoded antigen sequence, re-amplified with primers specific for illumina sequencing, and sequenced. The resultant sequencing data was compared to a database of the short peptide sequences, and if the TCR recognizes those peptides, we expect to see an enriched genetic sequence in the pool of extracted genomic DNA.

[0304] If the TCR recognizes a mutation sequence, but not the unmutated sequence, it would be a good candidate for immunotherapy. That would involve extracting immune cells from the patient, using whatever technique desired to make those cells express the desired TCR, and infusing those adoptive cells back into the patient so that they can start attacking the tumor.

[0305] To further demonstrate the versatility of SABR libraries, a personalized approach for neoantigen discovery was tested. A recent study identified a neoantigen-specific, tumor-reactive TCR from a melanoma patient using DNA-barcoded tetramers. The identified TCR (neoTCR) was shown to recognize a neoantigen epitope created by a non-synonymous mutation in the USP7 protein. The SABR library approach was used to identify the neoantigen epitope recognized by the neoTCR by screening all possible neoepitopes identified in the tumor sample. To that end, a SABR library presenting 3291 predicted HLA-A*0201-restricted epitopes (NeoAg-SABR library) corresponding to 108 non-synonymous mutations found in the tumor was generated. The neoTCR was used as a surrogate for a tumor-reactive orphan TCR and the NeoAg-SABR library was used to identify its antigen. Jurkat cells transduced with neoTCR were co-cultured with NFAT-GFP-Jurkat cells expressing the NeoAg-SABR library, GFP+CD69+ cells were sorted, and epitopes from the sorted cells were sequenced and ranked. FIG. 12A illustrates a representative flow cytometry plots from one replicate. NeoAg-SABR library cells based on reporter gene expression were sorted. Co-culture assays using 6 million library cells with 6 million TCR-transduced Jurkat cells were set up. At 10 hours post co-culture, cells were stained for CD69 and sorted using FACS. The rectangle 1202 in the top right corner of each flow plot shows the gate used for the sort. The frequency of cells in the sort gate is indicated as percentage.

[0306] For each epitope, the average ranks from the neoTCR sort against a mock-sort were plotted. FIG. 12B illustrates a plot of the average ranks from the neoTCR and the mock sorts. Within FIG. 12B, each dot represents the average rank for a unique epitope as calculated using the procedure described in FIGS. 10A-10C. The Y-axis shows average rank in the neoTCR sort, and the X-axis shows the average rank in the mock sort. Dots 1204 indicate USP7-derived epitopes. Seven epitopes formed a distinct cluster separated by their rank in the neoTCR sort.

[0307] FIG. 12C illustrates a plot of the average ranks for the top 24 hits from the neoTCR sort. Epitopes with asterisks indicate USP7-derived epitopes. The top seven hits in the neoTCR sort were epitopes derived from USP7, demonstrating successful identification of the neoantigen using our approach.

[0308] FIG. 12D illustrates a plot of the average ranks for all the USP7-derived epitopes in the NeoAg-SABR library. The non-synonymous D798Y mutation in USP7 was predicted to generate thirty overlapping neoepitopes, out of which seven were identified as cognate epitopes of neoTCR. The reason the remaining 23 epitopes were not recognized in the screen is probably due to the restricted register of the epitope recognized by the neoTCR. To validate the seven detected epitopes, individual SABRs to present them were constructed. NFAT-GFP-Jurkat cells transduced with these SABRs induced GFP expression upon co-culture with Jurkat cells expressing neoTCR, as shown in FIG. 12E. FIG. 12E illustrates a plot showing validation of top hits identified in the NeoAg-SABR screen. The Y-axis shows GFP expression at 8 hours in NFAT-GFP-Jurkat cells co-cultured with Jurkat cells transduced with neoTCR. Co-culture assays were set up using 10,000 Jurkat cells transduced with neoTCR and 10,000 NFAT-GFP-Jurkat cells expressing SABRs presenting epitopes indicated on the X-axis. The mock comprised untransduced NFAT-GFP-Jurkat cells. Within FIG. 12E, the bars represent mean±sd, n=4.

[0309] These results demonstrate validation as well as successful personalization of the antigen discovery approach presented herein. Collectively, the results demonstrate that the SABRs are powerful tools for T cell antigen discovery.

### Example 6

### Materials and Methods

[0310] The specific reagents used in Examples 1-5 are detailed in Table 6.1. The oligonucleotide primers used for cloning and sequencing are listed in Table 6.2. The lists of epitopes in the A2-SABR libraries are listed in Tables 6.3

TABLE 6.1

| Product Name | Manufacturer/Source | Cat. No |
|---|---|---|
| Jurkat Cells, Clone E6-1 | ATCC, Manassas, VA | TIB-152 |
| NFAT-GFP-Jurkat Cells | Provided by Arthur Weiss and Yvonne | N/A |
| | Chen | |
| Primary T Cells | UCLA, CFAR Virology Core | N/A |
| HEK-293T Cells | ATCC, Manassas, VA | CRL-3216 |
| RPMI 1640, 1X with L- | Corning ™, Corning, NY | 10-040-CV |
| glutamine | | |
| 10% Fetal Bovine Serum | Corning ™, Corning, NY | 35-015-CV |
| Penicillin-Streptomycin | Corning ™, Corning, NY | 30-002-CI |
| Solution, 100X | | |
| G-418 Sulfate | Corning ™, Corning, NY | 30-234-CI |
| Immunocult ™ CD3/28 T Cell | StemCell Technologies ™, Vancouver, | 10991 |
| Activator | Canada | |
| Human IL-2 IS, premium grade | MACS Miltenyi Biotec, Bergisch | 130-097-746 |
| | Gladbach, Germany | |
| EAAGIGILTV | Synthesized by Pierce Thermo Fisher | N/A |
| KRWIILGLNK | Synthesized by Pierce Thermo Fisher | N/A |
| DMEM, 1X with L-Glutamine, | Corning ™, Corning, NY | 10-013-CV |
| 4.5 g/L Glucose and Sodium | | |
| Pyruvate | | |
| Clontech In-Fusion ® HD | Clontech, Takara Bio USA, Mountain | 639650 |
| Cloning Kit | View, CA | |
| BsmBI | New England BioLabs ®, Inc, Ipswich, | R0580S |
| | MA | |
| Clontech Stellar ™ Competent | Clontech, Takara Bio USA, Mountain | 636763 |
| Cells | View, CA | |
| Zyppy ™ Plasmid Miniprep Kit | Zymo Research, Irvine, CA | D4036 |
| Carbenicillin (disodium) | Gold Biotechnology ®, Saint Louis, MO | C-103-SL10 |
| NucleoBond ® Xtra Maxi EF | Clontech, Takara Bio USA, Mountain | 740424.50 |
| Kit | View, CA | |
| TransIT ®-293 Transfection | Mirus ® Bio, LLC Madison, WI | MIR 2704 |
| Reagent | | |
| Gibco ™ Opti-MEM ™ I | Life Technologies, Thermo Fisher | 31985-062 |
| Reduced Serum Medium | Scientific, Waltham, MA | |
| Millex ®-HV Syringe Filter | EMD Millipore, Burlington, MA | SLHV033RS |
| Unit, 0.45 μm, PVDF, 33 mm, | | |
| gamma sterilized | | |
| MACSQuant ® Analyzer 10 | MACS Miltenyi Biotec, Bergisch | 130-096-343 |
| | Gladbach, Germany | |
| APC/Cy7 anti-human CD69 | BioLegend ®, San Diego, CA | 310913 |
| Clone: FN50 | | |
| BD FACSort ™ | Becton Dickinson, Franklin Lakes, NJ | |
| CFSE Cell Division Tracker Kit | BioLegend ®, San Diego, CA | 423801 |
| Invitrogen ™ PureLink ™ | Invitrogen ™ Life Technologies, Thermo | K182001 |
| Genomic DNA Mini Kit | Fisher Scientific, Waltham, MA | |
| KOD DNA Polymerase | EMD Millipore, Burlington, MA | 71085 |
| Macherey-Nagel NucleoSpin ® | Clontech, Takara Bio USA, Mountain | 740609.250 |
| Gel and PCR Purification Kit | View, CA | |
| 2100 Bioanalyzer Instrument | Agilent, Santa Clara, CA | G2939BA |
| Ilumina ® HiSeq 2500 | Illumina ® San Diego, CA | SY-401-2501 |
| Sequencing System | | |
| TreeStar FlowJo ® Flow | FlowJo, LLC Ashland, Oregon | N/A |
| Cytometric Data Analysis | | |
| Software v10 | | |
| GraphPad Prism v7 | GraphPad, San Diego, California | N/A |

TABLE 6.2

| Primer name | Sequence (5′-3′) | Purpose |
|---|---|---|
| SS-Fwd | AGCTCCTCGAGATGGCGACGGGTTCAAG | SABR cloning |
| CD28-Overlap- | CCACCGCGAGACCTCTTGCTCCGCACTTTA | SABR cloning |
| HLA-A2-Rev | CAAGCTGTGAGAGACACA | |
| CD28-Overlap- | CCACCGCGAGACCTCTTGCTCCGAGCTGTG | SABR cloning |
| HLA-B27-Rev | AGAGACACATCAGAGC | |
| CD28Intracell- | CGGAGCAAGAGGTCTCGC | SABR cloning |
| Fwd | | |
| XhoI-CD3z- | TTGACCTCGAGTCATCTTGGTGGCAGAGCC | SABR cloning |
| Rev | | |
| Oligo-Insert- | CAGGAGGGCTCGGCA | Cloning epitopes in |
| Fwd | | SABRs |
| Oligo-Insert- | GGACCCTCCGCATCC | Cloning epitopes in |
| Rev | | SABRs |
| Epitope-Oligo | CAGGAGGGCTCGGCA NNN . . . NNN | Cloning epitopes in |
| | GGATGCGGAGGGTCC | SABRs |
| TruSeq-Univ- | AATGATACGGCGACCACCGAGATCTACAC | High throughput |
| SCTfixed-F | TCTTTCCCTACACGACGCTCTTCCGATCTG | sequencing |
| | GCCTGCTTTGTTTGCC | |
| TruSeq-Read2- | GTGACTGGAGTTCAGACGTGTGCTCTTCCG | High throughput |
| SCTfixed-R | ATCTCCTCCACCACCGCTACCTC | sequencing |
| Truseq- | CAAGCAGAAGACGGCATACGAGAT[index] | High throughput |
| Adapter-Index | GTGACTGGAGTTCAGACGTGTGCTCTTCCG | sequencing |
| | ATCT | |

[0311] Within Table 6.2, NNN . . . NNN indicates a back-translated epitope and [index] indicates the 6-nucleotide unique index used for sequencing.

[0312] For Examples 1-5, Jurkat cells (ATCC) were cultured in R10 (RPMI1640 (Corning) supplemented with 10% fetal bovine serum (Corning) and Penicillin/Streptomycin (Corning)). NFAT-GFP-Jurkat cells were cultured in R10 supplemented with 2 mg/ml G-418 (Corning). Primary T cells were activated in R10 supplemented with Immunocult CD3/28 (StemCell Technologies) and 40 U/ml IL-2 (Miltenyi Biotec). HEK-293T cells (ATCC) were cultured in D10 (DMEM (Corning) supplemented with 10% fetal bovine serum (Corning) and Penicillin/Streptomycin (Corning)). Peptides EAAGIGILTV and KRWIILGLNK were synthesized by Pierce Thermo Fisher.

[0313] For constructing the SABRs of Examples 1-5, single molecules encoding for β2-microglobulin and HLA were synthesized as gBlocks (IDT) and amplified using primers SS-Fwd and CD28-Overlap-HLA-Rev. CD3ζ/CD28 signaling domains were cloned from the J3 CAR using primers CD28Intracell-Fwd and XhoI-CD3z-Rev. The two parts of SABRs were assembled via PCR or via InFusion HD cloning kit (Takara). A synthetic 2 kb fragment of non-specific stuffer DNA (IDT) flanked by BsmBI sites was cloned in place of the epitope. To clone a given epitope into a SABR vector, the vector was first linearized by BsmBI digestion (NEB) and gel purified using Nucleospin Gel and PCR kit (Takara). A single stranded oligonucleotide containing overlaps with the vector and the epitope was synthesized (IDT). The oligonucleotides were amplified using KOD polymerase (Milipore) and Oligo-Insert-Fwd and Oligo-Insert-Rev. Amplified oligonucleotide was cloned into the linearized SABR vector using InFusion HD cloning kit (Takara). All cloning reactions were transformed into Stellar competent cells (Takara), grown on LB+Agar plates containing 100 μg/ml Carbenicillin (Life Technologies), and individual colonies were inoculated in liquid culture. Plasmid minipreps were performed using Zyppy Miniprep kit (Zymo). Plasmids were verified by Sanger sequencing (Laragen).

[0314] For TCR cloning of Examples 1-5, sequences for the F5, SL9, and neoTCR were synthesized as gBlocks (IDT) and cloned in the pCCLc-MND-X backbone along with a truncated form of LNGFR gene as previously described. EC27 TCR was cloned as described previously.

[0315] To generate lists of epitopes to be cloned into SABR vectors in Examples 1-5, two approaches were taken. In the universal A2-SABR library, all HLA-A*0201-restricted epitopes from Immune Epitope Database (IEDB) were downloaded. In the neoantigen SABR library, HLA-A*0201-restricted neoepitopes generated from the tumor mutanome data were used. Protein sequences were back-translated to nucleotide sequences using the most abundant codon for each amino acid based on the GenScript Codon Usage Frequency Table Tool (GenScript). Oligonucleotides encoding for the epitopes and containing overlaps with the SABR vector were synthesized in pooled single stranded oligonucleotide libraries (Twist Biosciences). Oligonucleotide libraries were amplified and cloned into the SABR vector as described previously. To ensure sufficient coverage, bacterial cells transformed with the cloning reaction were inoculated directly into 500 ml liquid cultures overnight. The plasmid DNA containing the libraries was prepared using Nucleobond Xtra Maxi Plus EF.

[0316] Lentiviral vectors to express SABRs or TCRs were packaged using previously described procedures. Briefly, 5,000,000 HEK-293T cells were plated on poly-L-Lysine coated plates for 24 hours, followed by transfection of a mixture of the lentiviral shuttle plasmid, pMDG-VSVG, and pCMV-RD8.9 using TransIT-293 (Mirus Bio) and OPTI-MEM (Life Technologies). Viruses were filtered through 0.45 micron syringe filters (Milipore) and stored at −80° C. until further use. To transduce Jurkat, NFAT-GFP-Jurkat, or Primary T cells, 2-5×10⁵ cells were plated in culture medium and mixed with an equal volume of thawed virus in 12-well plates for three days. For NFAT-GFP-Jurkat cells, G-418 was added to the transduction mixture 48 hours later.

[0317] For the co-culture assays to test SABR signaling in Examples 1-5, 1-5×10⁴ transduced NFAT-GFP-Jurkat cells were incubated with equal number of transduced Jurkat cells on 96 well flat or round bottom plates for 8-10 hours. The cells were then acquired on MACSQuant (Miltenyi) or stained with anti-CD69-APC-Cy7 (Biolegend Clone #) and then acquired on MACSQuant (Miltenyi). For the SABR library assays, 1.5×10⁶ SABR library cells were incubated with 1.5×10⁶ Jurkat cells in each well of a 6 well plate. At 8-10 hours after co-culture, cells were harvested, stained with anti-CD69-APC-Cy7 (Biolegend), and sorted on a BD FACS SORP (Becton-Dickinson). Cytotoxicity assays were performed using target cells labeled with CFSE (Biolegend) as described previously. For the empty SABR assays, transduced NFAT-GFP-Jurkat cells were incubated with 100 mg/ml of soluble peptide for 2 hours at 37° C. Equal numbers of transduced Jurkat cells were then added to the cells, followed by 8-10 hours of co-culture. Gating strategies for these assays is shown in FIGS. 13A-13C. FIG. 13A illustrates a plot of the gating strategy used in co-culture assays to measure GFP expression. FIG. 13B illustrates a plot of the Gating strategy used in co-culture assays to measure GFP and CD69 expression. FIG. 13C illustrates a plot of the gating strategy used in cytotoxicity assays.

[0318] For the high-throughput sequencing and analysis of Examples 1-5, genomic DNA was extracted from sorted cells immediately following sorting using PureLink genomic DNA extraction kit (Life Technologies). The SABR vectors were amplified using KOD polymerase (Milipore) and 10:1:10 mixture of primers TruSeq-Univ-SCTfixed-F, TruSeq-Read2-SCTfixed-R, and Truseq-Adapter-Index respectively. For each sample, 5-10 reactions using 1-30 ng of genomic DNA were performed for 30-35 cycles. The reactions were pooled and purified using Nucleospin Gel and PCR purification kit (Takara). The purified PCR product was analyzed on Bioanalyzer (Agilent) and subjected to sequencing on HiSeq 2500 (Illumina). Unaligned reads generated by the sequencer were stored in FASTQ files. The reads were first aligned to the SABR vector using Burrows-Wheeler Alignment with a mismatch penalty of 1²². For each aligned read, the epitope was translated and counted. All epitopes were ranked according to the number of reads, and an average rank was calculated for each read. The average rank was then used for further analysis.

[0319] Flow cytometry plots were analyzed on FlowJo (Treestar). Statistical analyses and graphical representations were generated by Microsoft Excel (Microsoft) and GraphPad Prism (Graphpad).

[0320] The list of epitopes in the SABR libraries can be found in Tables 6.3.

Lengthy table referenced here
US20190201443A1-20190704-T00001
Please refer to the end of the specification for access instructions.

[0321] In some embodiments, any of the epitopes in Table 6.3 can be employed as the epitope in the SABR arrangement provided herein. In some embodiments, any of the epitopes in table 6.4 can be used as the epitope in the SABR arrangements provided herein.

TABLE 6.4

| | | | Parent |
|---|---|---|---|
| Epitope | Nucleic Acid | Amino Acid | Organism |
| CMV | AATCTGGTTCCGATGGTTGCCACAGTA | NLVPMVATV | Cytomegalovirus |
| pp65 | | | (CMV) |
| (495 - | | | |
| 503) | | | |
| EBV | GGCCTGTGTACGTTGGTGGCTATGCTG | GLCTLVAML | Epstein- |
| BMLF- | | | Barr Virus |
| 1 (280 - | | | (EBV) |
| 288) | | | |
| GAD65 | GTTATGAACATTTTGCTGCAGTACGTGGTG | VMNILLQYVV | Homo |
| (114- | | | sapiens |
| 123) | | | |
| GAD65 | ACAGTCTACGGGGCATTCGACCCTCTGCTGG | TVYGAFDPLL | Homo |
| (339 - | CCGTAGCAGAT | AVAD | sapiens |
| 352) | | | |
| glia-a | TCAGGGGAGGGCAGCTTCCAGCCGTCTCAAG | SGEGSFQPSQ | Common |
| (228 - | AAAATCCG | ENP | wheat |
| 240) | | | (Triticum |
| | | | aestivum) |
| glia-a1a | CCCTTCCCCCAGCCCGAGCTGCCCTAC | PFPQPELPY | Common |
| (60 - | | | wheat |
| 68) | | | (Triticum |
| | | | aestivum) |
| IA-2 | ATGGTATGGGAGAGCGGATGTACTGTG | MVWESGCTV | Homo |
| (797 - | | | sapiens |
| 805) | | | |
| IGRP | GTCCTCTTTGGTCTTGGGTTCGCAATC | VLFGLGFAI | Homo |
| (265 - | | | sapiens |
| 273) | | | |
| Insulin | CACCTCGTCGAGGCATTGTACCTCGTG | HLVEALYLV | Homo |
| B (10 - | | | sapiens |
| 18) | | | |
| Insulin | AGCCACCTGGTGGAGGCCCTGTACCTGGTGT | SHLVEALYLV | Homo |
| B (9- | GCGGCGAGAGGGGC | CGERG | sapiens |
| 23) | | | |
| KK10 | AAAAGATGGATAATCCTGGGATTAAATAAA | KRWIILGLNK | human |
| | | | immunode- |
| | | | ficiency |
| | | | virus |
| | | | (HIV) |
| LLO | AACGAGAAGTACGCCCAGGCCTACCCCAACG | NEKYAQAYP | Listeria |
| (190 - | TGAGCGCCAAGATCGAC | NVSAKID | monocyto |
| 205) | | | genes |
| MART1 | GAGGCCGCCGGCATCGGCATCCTGACCGTG | EAAGIGILTV | Homo |
| | | | sapiens |
| MART1- | GAGCTGGCCGGCATCGGCATCCTGACCGTG | ELAGIGILTV | Synthetic |
| A27L | | | |
| NYESO | AGCCTGCTGATGTGGATCACCCAGTGC | SLLMWITQC | Homo |
| | | | sapiens |
| NYESO- | TCCCTGCTGATGTGGATCACCCAGGTG | SLLMWITQV | Synthetic |
| 1V | | | |
| OVA | AGCATCATCAACTTCGAGAAGCTG | SIINFEKL | chicken |
| (257 - | | | (Gallus |
| 264) | | | gallus |
| | | | domesticus) |
| OVA | ATAAGCCAGGCCGTTCATGCTGCACATGCAG | ISQAVHAAHA | chicken |
| (323 - | AAATAAACGAGGCTGGCAGA | EINEAGR | (Gallus |
| 339) | | | gallus |
| | | | domesticus) |
| PPI (15 - | GCACTCTGGGGTCCTGATCCGGCTGCGGCT | ALWGPDPAA | Homo |
| 24) | | A | sapiens |
| ProIns | GGCGCCGGCAGCCTGCAGCCCCTGGCCCTGG | GAGSLQPLAL | Homo |
| C19-35 | AGGGCAGCCTGCAGAAGAGG | EGSLQKR | sapiens |
| ProIns | GGAAGTTTGCAGCCATTGGCTCTGGAAGGGA | GSLQPLALEG | Homo |
| C19-A3 | GCCTGCAAAAACGCGGCATTGTA | SLQKRGIV | sapiens |
| ProIns | GGAAGTTTGCAGCCATTGGCTTGGGAAGGGA | GSLQPLAWEG | Synthetic |
| C19-A3 | GCCTGCAAAAACGCGGCATTGTA | SLQKRGIV | |
| L3W | | | |
| SL9 | TCATTATATAATACAGTAGCAACCCTC | SLYNTVATL | human |
| | | | immunode- |
| | | | ficiency |
| | | | virus |
| | | | (HIV) |

### Example 7

### Antigen presenting Cells to Detect Islet Autoimmunity in Type 1 Diabetes

[0322] Type 1 Diabetes (T1D) is an autoimmune disorder caused by progressive destruction of insulin-producing pancreatic β cell islets. The role of T cells in pathology of T1D is well established by immunological studies and discovery of genetic risk factors. However, there is an unmet need for tools to link the immune manifestations of these genetic risk factors.

[0323] An immune-reactive cell, such as a pancreatic β cell in T1D, presents antigenic epitopes on human leukocyte antigen molecules (pHLA complexes) on its surface. T cells use their unique TCR to specifically recognize pHLA. In T1D, both CD4+ and CD8+ T cells recognize and respond to self-antigens on pancreatic β cells. CD8+ T cells recognize Class I pHLA and induce a cytotoxic response, whereas, CD4+ T cell recognize Class II pHLA and induce a helper response that modulates immune function. A bottleneck in studying T cells is at the identification of the antigens they target. Two major tools to detect the antigen-specific T cells are pHLA-multimers and functional assays. pHLA multimers are purified HLA molecules complexed with peptides and conjugated to fluorophores and are used to identify antigen-specific T cells by flow cytometry. Despite their extensive use, they have several limitations: Class II pHLA multimers are inherently unstable, in particular, those for alleles associated with increased risk for T1D (HLA-DQ2 and -DQ8) and are therefore difficult and non-robust to use, they do not represent the physiological immune synapse, and they fail to detect low-avidity T cells inherently associated with autoimmunity. Functional assays, such as ELISAs and ELISPOTs, efficiently detect T cell function by measuring cytokine production upon stimulation with Antigen Presenting Cells (APCs) presenting desired epitopes. However, these assays do not allow distinction between different pHLAs, as APCs have three to ten different HLA alleles. They are also reliant on the induction of a strong functional response such as IFNγ secretion and thus cannot detect functionally impaired autoimmune T cells. The detection of antigen-specific regulatory T cells (Tregs) is particularly challenging as their activity inhibits typically measured responses, and therefore is masked in functional assays as negative response. Indeed, there is an unmet need for detection of antigen-specific Tregs.

[0324] To that end, SABRs to detect pHLA-TCR interactions were constructed. FIG. 14A illustrates a schematic showing the structure of the SABR and signal induction by SABRs upon TCR-pHLA recognition. The extracellular domain of the SABR used in this example was a pHLA complex, which upon recognition by a T cell, causes the intracellular domain to induce a signal. APCs engineered to express SABRs present a given epitope and induce a measurable output when recognized by cognate T cells. The advantages of SABR-APCs over multimers or functional assays include: physiological pHLA display of single alleles on the surface of an APC, ability to define pHLA combinations genetically, multiplexed detection of epitope specificities, and detection of pHLA-TCR interaction independently from T cell function. FIG. 14B and FIG. 14C demonstrate this technique by showing induction of a signal by a SABR presenting Ovalbumin peptide on a mouse class II pMHC (IAb-OVA) upon recognition by cognate T cells. These SABR-APCs can be used to detect islet-specific immune responses in T1D patients, to study the immunological effects of genetic risk factors, and to interrogate natural and immunotherapy-induced T cells.

[0325] The SABR-APCs can be used to understand the immunological mechanism of protective and susceptible genetic risk factors. Several Class II HLA alleles are associated with either protection from or susceptibility to T1D. Both HLA-DQ2 and DQ8 are risk factors for T1D, and particularly, patients who carry both alleles are at significantly higher risk than those carrying either allele alone. This phenomenon is thought to be due to cross-pairing of DQ2 and DQ8 chains (known as DQ2trans or DQ8trans) that may present peptide epitopes and induce autoimmunity. APCs from these patients express correctly paired and cross-paired molecules simultaneously, which cannot be distinguished by current methods, as shown in FIG. 14D. FIG. 14D illustrates four combinations of HLA-DQ alleles on APCs from DQ2-DQ8 heterozygous patients. SABRs can be used to display genetically encoded peptide epitopes linked to specific pairs of such so-called HLA-DQ transdimers on separate APCs to study the differences between patients carrying different genetic risk factors using a rare B-cell line lacking the endogenous DR and DQ locus, as shown in FIG. 14E. FIG. 14E illustrates SABRs encoding four DQ2/8 combinations on separate APCs allowing their distinction. Furthermore, SABR-APCs can be used to distinguish between immunogenicity of protective and susceptible variants of Insulin Defective Ribosomal Products (INS-DRiPs). Thus, the differences between immune responses from individuals carrying different genetic risk alleles can be dissected.

[0326] The function of islet autoreactive effector and regulatory T cells using SABR-APCs can also be studied. Autoimmune T cells exhibit unusual modes of antigen recognition and subsequent functional output. For instance, regulatory T cells specific for HLA-DR4-Proinsulin (C19-A3) bind with reversed polarity compared to effector T cells specific for the same epitope. Because of the inherent limitations in pHLA multimers, studying these distinctions has been extremely challenging. Therefore, SABR-APCs presenting these epitopes as substrates can be used for measuring the functional differences between islet-specific T cell clones derived from T1D patients. These studies can be used understand the functional basis of distinct T cell subtypes from the perspective of the APC.

[0327] Natural and immunotherapy-induced islet-specific T cell responses can be detected using SABRs. In scenarios of suppressed immune function, current methods fail to detect antigen-specific T cells. This is particularly relevant in scenarios of islet transplantation or immune tolerance observed in healthy individuals or in patients successfully treated with tolerogenic immunotherapy, such as vaccination with Proinsulin C19-A3. Since the technology platform described herein only relies on TCR/epitope/HLA interaction, islet specific effector or regulatory T-cells can be detected and enumerated, even if their response is suppressed. SABR-APCs can be used to diagnose C19-A3-specific T cell responses from patients receiving immunotherapy with tolerogenic dendritic cells pulsed with this immunodominant proinsulin peptide. The use of SABRs can be extended for immunomonitoring by multiplexing detection of several epitopes from the same patient sample, allowing identification of ‘immune signatures’ in the islet-specific autoimmune responses that may correlate with response to this novel type of tissue specific immune intervention therapy.

### Example 8

### Class II MHC SABRs

[0328] SABRs comprising antigen presenting domains comprising class II MHC were also tested to determine signaling induction capability. The experimental methods described in Example 1 and 6 were used to test the capacity of class II MHC SABRs. FIG. 15A illustrates a schematic of IAb-OVA and Hum IAb-OVA SABRs and signaling induction upon recognition of an OT-II TCR. FIG. 15B illustrates a bar graph showing signaling induction of OT-II TCR for IAb-OVA and Hum IAb-OVA SABRs. As shown in FIG. 15B, the class II MHC SABRs were capable of inducing a signal while the other constructs did not induce signals. The results show that SABRs comprising class II MHC can induce signaling upon successful and specific TCR-pMHC interaction.

[0329] Furthermore, FIG. 16A illustrates a schematic of IAb-OVA DCH and an IAb-OVA DCH-SABR and signaling induction upon recognition of an OT-II TCR. FIG. 16B illustrates a bar graph showing signaling induction of OT-II TCR for IAb-OVA and Hum IAb-OVA SABRs. These results also show that SABRs comprising class II MHC can induce signaling upon successful and specific TCR-pMHC interaction. Thus, the experiment using Class I MHC SABRs, which are known for being relatively easy to work with, also worked for Class II MHC SABRs, which are known for being difficult to work with traditional methods for antigen discovery described herein.

### Example 9

### SABRs Recognize Primary Cells

[0330] SCDR constructs were constructed to express, for example, either A2-NYESO (a cancer-specific MHCT antigen combination) or B27-KK10 (an HIV-specific MHC-antigen combination). In some embodiments, the SCDR constructs for A2 and B27 can be constructed and a peptide can be used to present, for example, either NYESO or KK10 antigen. NFAT-GFP-Jurkats, can be transduced with the SCTR constructs or with SCDR constructs and pulsed with peptide antigen as reporter cells. The reporter cells can be transduced with Jurkat cells expressing, for example, either A2-NYESO-specific TCR or B27-KK10-specific TCR, and the frequency of GFP+ cells can be measured with flow cytometry. FIG. 17A illustrates a line graph depicting % GFP+ cells over time. FIG. 17B illustrates representative flow cytometry plots from the experiment.

[0331] The results show that a signal was induced in about 30% of reporter cells within 4 hours of incubation and about 50% of reporter cells within 8 hours of incubation. Also, about 50% of the maximal signal was attained at 4 hours and about 100% of the maximal signal was attained by 8 hours.

[0332] Using the experimental results of Examples 3 and 6, TCR-transduced Jurkat cells were co-incubated with SCTR-transduced NFAT-GFP-Jurkat cells. FIG. 18A illustrates a bar graph depicting the frequency of % GFP+ for TCR-transduced Jurkat cells incubated with SCTR-transduced NFAT-GFP-Jurkat cells. FIG. 18B illustrates a bar graph depicting the frequency of % GFP+ for TCR-transduced PBMCs incubated with SCTR-transduced NFAT-GFP-Jurkat cells. FIG. 18C illustrates a line graph depicting the frequency over time of % GFP+ for TCR-transduced PBMCs incubated with SCTR-transduced NFAT-GFP-Jurkat cells.

[0333] As illustrated in FIGS. 18A-18C, SABRs are able to recognize antigen receptors on primary cells (e.g. directly from patient samples), the same way they recognize transgenic antigen receptors in cell lines.

### Species, Variants, Deletions, or Modified Versions of Embodiments

[0334] In some embodiments, any species, variant, deletion, or modified version of each of the noted protein components (especially MHC fragment) can be employed, as long as they function as described herein. In some embodiments, this is achieved if the sequence employed is a human sequence for the component provided herein. In some embodiments, the sequence of the component can be mammalian. In some embodiments, the sequence of the component can be 80% or greater identity to a sequence provided herein or the human sequence of the component provided herein, for example, 80, 85, 90, 91, 92, 93, 94, 95, 96, 97, 98, 99, 99.9% or greater identity to the human sequence of the component (e.g., MHC, epitope, etc.). In some embodiments, the component can be a variant, as long as those sequences that are conserved between organisms are maintained. Examples of such permissible variants are described in the logo based sequence alignments provided in FIGS. 20A-20F. FIG. 20A displays a sequence alignment for class I MHC across a wide variety of species. FIG. 20B displays a sequence alignment for class I MHC across humans. FIG. 20C displays a sequence alignment for class II alpha MHC across a wide variety of species. FIG. 20D displays a sequence alignment for class II alpha MHC across humans. FIG. 20E displays a sequence alignment for class II beta MHC across a wide variety of species. FIG. 20F displays a sequence alignment for class II beta MHC across humans. With this information, one of skill in the art will appreciate those sections of the protein that are conserved and thus important for function, and those sections that are not conserved and thus can be varied.

[0335] The images in FIGS. 20A-20F are sequence logos, which are graphical representations of an amino acid or nucleic acid multiple sequence alignment. The logo is a sequence of stacks of letters, one stack for each position in the amino acid sequence alignment. The overall height of the stack indicates the sequence conservation at that position, while the height of symbols within the stack indicates the relative frequency of each amino or nucleic acid at that position. Similar to a stacked bar graph, where the one-letter code of the amino acid is used instead of a colored bar. The width of the stack is proportional to the fraction of missing sequences at that position. It is noted that many of the MHC molecules do not contain full sequences. Thinner letters mean that some sequences are missing information for that region. In these depictions, the width of the letters shouldn't matter overly. In some embodiments, the guidance is focused on those sections from parts that have deeper sequencing coverage.

### REFERENCES

[0336] All references are incorporated by reference in their entireties.

[0337] Shankar an, V. et al. IFNgamma and lymphocytes prevent primary tumour development and shape tumour immunogenicity. Nature 410, 1107-1111, doi:10.1038/35074122 (2001).

[0338] Lollini, P. L., Cavallo, F., Nanni, P. & Forni, G. Vaccines for tumour prevention. Nature reviews. Cancer 6, 204-216, doi:10.1038/nrc1815 (2006).

[0339] Leach, D. R., Krummel, M. F. & Allison, J. P. Enhancement of antitumor immunity by CTLA-4 blockade. Science 271, 1734-1736 (1996).

[0340] Dong, H. et al. Tumor-associated B7-H1 promotes T-cell apoptosis: a potential mechanism of immune evasion. Nature medicine 8, 793-800, doi:10.1038/nm730 (2002).

[0341] Yee, C. et al. Adoptive T cell therapy using antigen-specific CD8+ T cell clones for the treatment of patients with metastatic melanoma: in vivo persistence, migration, and antitumor effect of transferred T cells. Proceedings of the National Academy of Sciences of the United States of America 99, 16168-16173, doi:10.1073/pnas.242600099 (2002).

[0342] Davis, M. M. & Bjorkman, P. J. T-cell antigen receptor genes and T-cell recognition. Nature 334, 395-402, doi:10.1038/334395a0 (1988).

[0343] Weiss, A. & Littman, D. R. Signal transduction by lymphocyte antigen receptors. Cell 76, 263-274 (1994).

[0344] Bethune, M. T. & Joglekar, A. V. Personalized T cell-mediated cancer immunotherapy: progress and challenges. Curr Opin Biotechnol 48, 142-152, doi:10.1016/j.copbio.2017.03.024 (2017).

[0345] Woodsworth, D. J., Castellarin, M. & Holt, R. A. Sequence analysis of T-cell repertoires in health and disease. Genome Med 5, 98, doi:10.1186/gm502 (2013).

[0346] Buchholz, V. R., Schumacher, T. N. & Busch, D. H. T Cell Fate at the Single-Cell Level. Annual review of immunology 34, 65-92, doi:10.1146/annurev-immunol-032414-112014 (2016).

[0347] Klenerman, P., Cerundolo, V. & Dunbar, P. R. Tracking T cells with tetramers: new tales from new tools. Nature reviews. Immunology 2, 263-272, doi:10.1038/nri777 (2002).

[0348] Castle, J. C. et al. Exploiting the mutanome for tumor vaccination. Cancer research 72, 1081-1091, doi:10.1158/0008-5472.CAN-11-3722 (2012).

[0349] Boon, T. & van der Bruggen, P. Human tumor antigens recognized by T lymphocytes. The Journal of experimental medicine 183, 725-729 (1996).

[0350] Matsushita, H. et al. Cancer exome analysis reveals a T-cell-dependent mechanism of cancer immunoediting. Nature 482, 400-404, doi:10.1038/nature10755 (2012).

[0351] Gee, M. H. et al. Antigen Identification for Orphan T Cell Receptors Expressed on Tumor-Infiltrating Lymphocytes. Cell 172, 549-563 e516, doi:10.1016/j.cell.2017.11.043 (2018).

[0352] Birnbaum, M. E. et al. Deconstructing the Peptide-MHC Specificity of T Cell Recognition. Cell 157, 1073-1087, doi:10.1016/j.cell.2014.03.047 (2014).

[0353] Yu, Y. Y., Netuschil, N., Lybarger, L., Connolly, J. M. & Hansen, T. H. Cutting edge: single-chain trimers of MHC class I molecules form stable structures that potently stimulate antigen-specific T cells and B cells. Journal of immunology 168, 3145-3149 (2002).

[0354] Morgan, R. A. et al. Cancer regression in patients after transfer of genetically engineered lymphocytes. Science 314, 126-129 (2006).

[0355] Joglekar, A. V. et al. T cell receptors for the HIV KK10 epitope from patients with differential immunologic control are functionally indistinguishable. Proceedings of the National Academy of Sciences of the United States of America 115, 1877-1882, doi:10.1073/pnas.1718659115 (2018).

[0356] Bennett, M. S., Joseph, A., Ng, H. L., Goldstein, H. & Yang, O. O. Fine-tuning of T-cell receptor avidity to increase HIV epitope variant recognition by cytotoxic T lymphocytes. Aids 24, 2619-2628, doi:10.1097/QAD.0b013e32833f7b22 (2010).

[0357] Sahin, U. et al. Personalized RNA mutanome vaccines mobilize poly-specific therapeutic immunity against cancer. Nature 547, 222-226, doi:10.1038/nature23003 (2017).

[0358] Li, H. & Durbin, R. Fast and accurate short read alignment with Burrows-Wheeler transform. Bioinformatics 25, 1754-1760, doi:10.1093/bioinformatics/btp324 (2009).

[0359] Vita, R. et al. The immune epitope database (IEDB) 3.0. Nucleic acids research 43, D405-412, doi:10.1093/nar/gku938 (2015).

[0360] Yokomaku, Y. et al. Impaired processing and presentation of cytotoxic-T-lymphocyte (CTL) epitopes are major escape mechanisms from CTL immune pressure in human immunodeficiency virus type 1 infection. Journal of virology 78, 1324-1332 (2004).

[0361] Dorrell, L. et al. Distinct recognition of non-clade B human immunodeficiency virus type 1 epitopes by cytotoxic T lymphocytes generated from donors infected in Africa. Journal of virology 73, 1708-1714 (1999).

[0362] Peakman, M. et al. T cell clones generated from patients with type 1 diabetes using interleukin-2 proliferate to human islet antigens. Autoimmunity 17, 31-39 (1994).

[0363] Tang, Q. & Bluestone, J. A. The Foxp3+ regulatory T cell: a jack of all trades, master of regulation. Nature immunology 9, 239-244, doi:10.1038/ni1572 (2008).

[0364] Garcia, K. C. et al. Structural basis of plasticity in T cell receptor recognition of a self peptide-MHC antigen. Science 279, 1166-1172 (1998).

[0365] Taguchi, T. et al. Detection of individual mouse splenic T cells producing IFN-gamma and IL-5 using the enzyme-linked immunospot (ELISPOT) assay. Journal of immunological methods 128, 65-73 (1990).

[0366] Suwandi, J. S., Nikolic, T. & Roep, B. O. Translating Mechanism of Regulatory Action of Tolerogenic Dendritic Cells to Monitoring Endpoints in Clinical Trials. Frontiers in immunology 8, 1598, doi:10.3389/fimmu.2017.01598 (2017).

[0367] Bentzen, A. K. & Hadrup, S. R. Evolution of MHC-based technologies used for detection of antigen-responsive T cells. Cancer immunology, immunotherapy: CII 66, 657-666, doi:10.1007/s00262-017-1971-5 (2017).

[0368] Tran, E. et al. Cancer immunotherapy based on mutation-specific CD4+ T cells in a patient with epithelial cancer. Science 344, 641-645, doi:10.1126/science.1251102 (2014).

[0369] Bassani-Sternberg, M. et al. Direct identification of clinically relevant neoepitopes presented on native human melanoma tissue by mass spectrometry. Nature communications 7, 13404, doi:10.1038/ncomms13404 (2016).

[0370] Roep B O (2003) The role of T-cells in the pathogenesis of Type 1 diabetes: from cause to cure. Diabetologia 46(3):305-321.

[0371] Sharma G & Holt R A (2014) T-cell epitope discovery technologies. Human immunology 75(6):514-519.

[0372] Bentzen A K & Hadrup S R (2017) Evolution of MHC-based technologies used for detection of antigen-responsive T cells. Cancer immunology, immunotherapy: CII 66(5):657-666.

[0373] Pike K A, Hui C, & Krawczyk C M (2016) Detecting Secreted Analytes from Immune Cells: An Overview of Technologies. Methods in molecular biology 1458:111-124.

[0374] Nepom G T, et al. (2002) HLA class II tetramers: tools for direct analysis of antigen-specific CD4+ T cells. Arthritis and rheumatism 46(1):5-12.

[0375] Arif S, et al. (2004) Autoreactive T cell responses show proinflammatory polarization in diabetes but a regulatory phenotype in health. The Journal of clinical investigation 113(3):451-463.

[0376] Van Lummel M, et al. (2012) Type 1 diabetes-associated HLA-DQ8 transdimer accommodates a unique peptide repertoire. The Journal of biological chemistry 287(12):9514-9524.

[0377] Kracht M J, et al. (2017) Autoimmunity against a defective ribosomal insulin gene product in type 1 diabetes. Nature medicine 23(4):501-507.

[0378] Beringer D X, et al. (2015) T cell receptor reversed polarity recognition of a self-antigen major histocompatibility complex. Nature immunology 16(11):1153-1161.

[0379] Alhadj Ali M, et al. (2017) Metabolic and immune effects of immunotherapy with proinsulin peptide in human new-onset type 1 diabetes. Science translational medicine 9(402).

LENGTHY TABLES
The patent application contains a lengthy table section. A copy of the table is available in electronic form from the USPTO web site (http://seqdata.uspto.gov/?pageRequest=docDetail&DocID=US20190201443A1). An electronic copy of the table will also be available from the USPTO upon request and payment of the fee set forth in 37 CFR 1.19(b)(3).

The application's sequence listing, which the Patent Office published only in electronic form, follows.

SEQUENCE LISTING (12194 sequences)

SEQ ID NO: 1 - protein, 9 aa, Homo sapiens
AAGIGILTV

SEQ ID NO: 2 - protein, 10 aa, Trypanosoma cruzi
AASTLLYATV

SEQ ID NO: 3 - protein, 10 aa, Homo sapiens
ACDPHSGHFV

SEQ ID NO: 4 - protein, 10 aa, Hepatitis C virus
ADLMGYIPLV

SEQ ID NO: 5 - protein, 9 aa, Homo sapiens
AIIDPLIYA

SEQ ID NO: 6 - protein, 9 aa, Human immunodeficiency virus type 1
AIIRILQQL

SEQ ID NO: 7 - protein, 9 aa, Homo sapiens
AIISGDSPV

SEQ ID NO: 8 - protein, 9 aa, Hepatitis C virus
AILHTPGCV

SEQ ID NO: 9 - protein, 9 aa, Influenza A virus
AIMDKNIIL

SEQ ID NO: 10 - protein, 9 aa, Influenza A virus
AIMDKNIML

SEQ ID NO: 11 - protein, 9 aa, H5N1 subtype
AIMDKNITL

SEQ ID NO: 12 - protein, 9 aa, H5N1 subtype
AIMDKTIIL

SEQ ID NO: 13 - protein, 9 aa, H5N1 subtype
AIMDKVIIL

SEQ ID NO: 14 - protein, 9 aa, Influenza A virus
AIMEKNIIL

SEQ ID NO: 15 - protein, 9 aa, Influenza A virus
AIMEKNIML

SEQ ID NO: 16 - protein, 9 aa, Human papillomavirus type 1a
AITEVECFL

SEQ ID NO: 17 - protein, 9 aa, Hepatitis C virus
ALAHGVRAL

SEQ ID NO: 18 - protein, 9 aa, Homo sapiens
ALAPSTMKI

SEQ ID NO: 19 - protein, 9 aa, Chlamydia pneumoniae
ALAYGIDKV

SEQ ID NO: 20 - protein, 9 aa, Vaccinia virus
ALDEKLFLI

SEQ ID NO: 21 - protein, 10 aa, Homo sapiens
ALDGGNKHFL

SEQ ID NO: 22 - protein, 10 aa, Mycobacterium tuberculosis
ALEAFAIAVA

SEQ ID NO: 23 - protein, 9 aa, human herpesvirus 1
ALFFFDIDL

SEQ ID NO: 24 - protein, 10 aa, Human betaherpesvirus 5
ALFFFDIDLL

SEQ ID NO: 25 - protein, 9 aa, Homo sapiens
ALFGALFLA

SEQ ID NO: 26 - protein, 9 aa, Vaccinia virus Copenhagen
ALFYKDGKL

SEQ ID NO: 27 - protein, 9 aa, Mycobacterium tuberculosis
ALGGGATGV

SEQ ID NO: 28 - protein, 9 aa, Homo sapiens
ALLAGSEYL

SEQ ID NO: 29 - protein, 9 aa, herpes simplex virus 7
ALLEDPVGT

SEQ ID NO: 30 - protein, 9 aa, Homo sapiens
ALMDKSLHV

SEQ ID NO: 31 - protein, 9 aa, Hepatitis B virus
ALMPLYACI

SEQ ID NO: 32 - protein, 9 aa, Homo sapiens
ALNSKDAAL

SEQ ID NO: 33 - protein, 9 aa, SARS coronavirus
ALNTLVKQL

SEQ ID NO: 34 - protein, 9 aa, SARS coronavirus
ALNTPKDHI

SEQ ID NO: 35 - protein, 9 aa, Lymphocytic choriomeningitis virus
ALPHIIDEV

SEQ ID NO: 36 - protein, 9 aa, Homo sapiens
ALREEEEGV

SEQ ID NO: 37 - protein, 9 aa, Hepatitis C virus
ALRGMGLNA

SEQ ID NO: 38 - protein, 10 aa, Hepatitis C virus
ALRGMGVNAV

SEQ ID NO: 39 - protein, 9 aa, Dengue virus type 2
ALSELPETL

SEQ ID NO: 40 - protein, 9 aa, Trypanosoma cruzi
ALSLAAVLV

SEQ ID NO: 41 - protein, 10 aa, Trypanosoma cruzi
ALSLAAVLVV

SEQ ID NO: 42 - protein, 9 aa, Hepatitis C virus
ALSTGLIHL

SEQ ID NO: 43 - protein, 12 aa, Homo sapiens
ALWDIETGQQTV

SEQ ID NO: 44 - protein, 9 aa, Homo sapiens
ALWGFFPVL

SEQ ID NO: 45 - protein, 9 aa, Hepatitis C virus
ALYDVVSKL

SEQ ID NO: 46 - protein, 9 aa, Hepatitis C virus
ALYDVVTKL

SEQ ID NO: 47 - protein, 9 aa, Yellow fever virus
ALYEKKLAL

SEQ ID NO: 48 - protein, 9 aa, Mycobacterium tuberculosis
AMASTEGNV

SEQ ID NO: 49 - protein, 9 aa, H5N1 subtype
AMDSNTLEL

SEQ ID NO: 50 - protein, 9 aa, Homo sapiens
AMLDLLKSV

SEQ ID NO: 51 - protein, 10 aa, Homo sapiens
AMLGTHTMEV

SEQ ID NO: 52 - protein, 9 aa, Yellow fever virus
AMLHWSLIL

SEQ ID NO: 53 - protein, 9 aa, Vaccinia virus
AMLNGLIYV

SEQ ID NO: 54 - protein, 9 aa, Homo sapiens
AMVGAVLTA

SEQ ID NO: 55 - protein, 9 aa, Mycobacterium tuberculosis
AQLLTEFAI

SEQ ID NO: 56 - protein, 9 aa, Plasmodium falciparum
ASKNKEKAL

SEQ ID NO: 57 - protein, 9 aa, Artificial Sequence
  UNKNOWN
ALSDHHIYL

SEQ ID NO: 58 - protein, 9 aa, Hepatitis C virus
ATDALMTGF

SEQ ID NO: 59 - protein, 9 aa, Hepatitis C virus
ATDALMTGY

SEQ ID NO: 60 - protein, 9 aa, West Nile virus
ATWAENIQV

SEQ ID NO: 61 - protein, 9 aa, Mycobacterium tuberculosis
AVAGAAILV

SEQ ID NO: 62 - protein, 10 aa, Human gammaherpesvirus 4
AVFDRKSDAK

SEQ ID NO: 63 - protein, 9 aa, Hepatitis C virus
CINGCVWTV

SEQ ID NO: 64 - protein, 9 aa, Hepatitis C virus
CINGVCWTA

SEQ ID NO: 65 - protein, 9 aa, Hepatitis C virus
CINGVCWTV

SEQ ID NO: 66 - protein, 9 aa, Hepatitis C virus
CINGVWCTV

SEQ ID NO: 67 - protein, 9 aa, Human gammaherpesvirus 4
CLAGLLTMV

SEQ ID NO: 68 - protein, 9 aa, Hepatitis B virus
CLFKDWEEL

SEQ ID NO: 69 - protein, 9 aa, Human gammaherpesvirus 4
CLGGLITMV

SEQ ID NO: 70 - protein, 9 aa, Human gammaherpesvirus 4
CLGGLLTMV

SEQ ID NO: 71 - protein, 9 aa, Human polyomavirus 1
CLLPKMDSV

SEQ ID NO: 72 - protein, 10 aa, Macaca mulatta
CLLPKMDSVV

SEQ ID NO: 73 - protein, 9 aa, H5N1 subtype
CLPACVYGL

SEQ ID NO: 74 - protein, 9 aa, Vaccinia virus
CLTEYILWV

SEQ ID NO: 75 - protein, 9 aa, Triticum aestivum
CQNGACWTS

SEQ ID NO: 76 - protein, 9 aa, Influenza A virus
CVNGSCFTV

SEQ ID NO: 77 - protein, 9 aa, Hepatitis C virus
CVNGVCWTV

SEQ ID NO: 78 - protein, 11 aa, Human betaherpesvirus 5
CYVLEETSVML

SEQ ID NO: 79 - protein, 9 aa, human herpesvirus 1
DIYRIFAEL

SEQ ID NO: 80 - protein, 9 aa, Hepatitis C virus
DLCGSVFLV

SEQ ID NO: 81 - protein, 10 aa, Plasmodium falciparum
DLDEPEQFRL

SEQ ID NO: 82 - protein, 9 aa, Homo sapiens
DLERKVESL

SEQ ID NO: 83 - protein, 10 aa, Hepatitis C virus
DLIAQPIRLL

SEQ ID NO: 84 - protein, 9 aa, Plasmodium falciparum
DLLEEGNTL

SEQ ID NO: 85 - protein, 9 aa, Hepatitis C virus
DLMGYIPAV

SEQ ID NO: 86 - protein, 9 aa, Hepatitis C virus
DLMGYIPLV

SEQ ID NO: 87 - protein, 9 aa, Measles virus
DLSLRRFMV

SEQ ID NO: 88 - protein, 9 aa, Mycobacterium tuberculosis
DMWEHAFYL

SEQ ID NO: 89 - protein, 10 aa, Mycobacterium tuberculosis
DMWEHAFYLQ

SEQ ID NO: 90 - protein, 9 aa, Human gammaherpesvirus 8
DNLMWYELS

SEQ ID NO: 91 - protein, 10 aa, Human gammaherpesvirus 4
DTPLIPLTIF

SEQ ID NO: 92 - protein, 9 aa, Trypanosoma cruzi
DVSRPTAVV

SEQ ID NO: 93 - protein, 10 aa, Homo sapiens
EAAGIGILTV

SEQ ID NO: 94 - protein, 10 aa, Homo sapiens
ELAGIGILTV

SEQ ID NO: 95 - protein, 9 aa, Hepatitis C virus
ELIEANLLW

SEQ ID NO: 96 - protein, 9 aa, Trypanosoma cruzi
ELIEANLLW

SEQ ID NO: 97 - protein, 9 aa, Hepatitis B virus
ELMTLATWV

SEQ ID NO: 98 - protein, 9 aa, Vaccinia virus
EMKYALINL

SEQ ID NO: 99 - protein, 9 aa, Vaccinia virus
EMQLKIDKL

SEQ ID NO: 100 - protein, 11 aa, Human betaherpesvirus 5
ESLKTFEQVTE

SEQ ID NO: 101 - protein, 9 aa, Hepatitis C virus
ETFWAKHMW

SEQ ID NO: 102 - protein, 11 aa, Hepatitis C virus
EVIAPAVQTNW

SEQ ID NO: 103 - protein, 9 aa, Coxsackievirus
EVKEKHEFL

SEQ ID NO: 104 - protein, 9 aa, Human papillomavirus type 16
FAFRDLCIV

SEQ ID NO: 105 - protein, 9 aa, Trypanosoma cruzi
FANCNFTLV

SEQ ID NO: 106 - protein, 9 aa, Trypanosoma cruzi
FANHDFTLV

SEQ ID NO: 107 - protein, 9 aa, Trypanosoma cruzi
FANHKFTLV

SEQ ID NO: 108 - protein, 9 aa, Trypanosoma cruzi
FANHNFTLV

SEQ ID NO: 109 - protein, 9 aa, Trypanosoma cruzi
FANNEFTLV

SEQ ID NO: 110 - protein, 9 aa, Trypanosoma cruzi
FANNKFTLV

SEQ ID NO: 111 - protein, 9 aa, Trypanosoma cruzi
FANYKFTLV

SEQ ID NO: 112 - protein, 9 aa, Trypanosoma cruzi
FANYNFTLV

SEQ ID NO: 113 - protein, 9 aa, SARS coronavirus
FIAGLIAIV

SEQ ID NO: 114 - protein, 11 aa, Human betaherpesvirus 5
FIAGNSAYEYV

SEQ ID NO: 115 - protein, 9 aa, Vaccinia virus
FILGIIITV

SEQ ID NO: 116 - protein, 9 aa, herpes simplex virus 7
FIPENQRTV

SEQ ID NO: 117 - protein, 12 aa, Homo sapiens
FIVPLTDLRIPS

SEQ ID NO: 118 - protein, 9 aa, Mycobacterium tuberculosis
FIYAGSLSA

SEQ ID NO: 119 - protein, 9 aa, Human gammaherpesvirus 4
FLDKGTYTL

SEQ ID NO: 120 - protein, 9 aa, Homo sapiens
FLEQQNKIL

SEQ ID NO: 121 - protein, 10 aa, Homo sapiens
FLEQQNKILL

SEQ ID NO: 122 - protein, 10 aa, Homo sapiens
FLFDGSPTYV

SEQ ID NO: 123 - protein, 11 aa, Homo sapiens
FLFDGSPTYVL

SEQ ID NO: 124 - protein, 9 aa, Homo sapiens
FLFLRNFSL

SEQ ID NO: 125 - protein, 10 aa, Human immunodeficiency virus
FLGKIWPSYK

SEQ ID NO: 126 - protein, 9 aa, Homo sapiens
FLGMESCGI

SEQ ID NO: 127 - protein, 9 aa, Human polyomavirus 1
FLHCIVFNV

SEQ ID NO: 128 - protein, 9 aa, Vaccinia virus
FLHTTFIDV

SEQ ID NO: 129 - protein, 10 aa, Plasmodium falciparum
FLIFFDLFLV

SEQ ID NO: 130 - protein, 10 aa, Hepatitis C virus
FLIFFDLFLV

SEQ ID NO: 131 - protein, 9 aa, Hepatitis C virus
FLLLADARV

SEQ ID NO: 132 - protein, 9 aa, Hepatitis B virus
FLLSLGIHL

SEQ ID NO: 133 - protein, 9 aa, Hepatitis B virus
FLLTKILTI

SEQ ID NO: 134 - protein, 9 aa, Hepatitis B virus
FLLTRILTI

SEQ ID NO: 135 - protein, 10 aa, Francisella tularensis
FLMPFMHYIV

SEQ ID NO: 136 - protein, 9 aa, Vaccinia virus
FLNISWFYI

SEQ ID NO: 137 - protein, 10 aa, Hepatitis B virus
FLPADFFPSI

SEQ ID NO: 138 - protein, 10 aa, Hepatitis B virus
FLPADFFPSV

SEQ ID NO: 139 - protein, 10 aa, Hepatitis B virus
FLPNDFFPSV

SEQ ID NO: 140 - protein, 10 aa, Hepatitis B virus
FLPPDFFPSV

SEQ ID NO: 141 - protein, 10 aa, Hepatitis B virus
FLPSDFFPGV

SEQ ID NO: 142 - protein, 9 aa, Hepatitis B virus
FLPSDFFPS

SEQ ID NO: 143 - protein, 10 aa, Hepatitis B virus
FLPSDFFPSA

SEQ ID NO: 144 - protein, 10 aa, Hepatitis B virus
FLPSDFFPSI

SEQ ID NO: 145 - protein, 10 aa, Hepatitis B virus
FLPSDFFPSV

SEQ ID NO: 146 - protein, 10 aa, Hepatitis B virus
FLPSDFLPSV

SEQ ID NO: 147 - protein, 10 aa, Hepatitis B virus
FLPSDTNMGL

SEQ ID NO: 148 - protein, 10 aa, Homo sapiens
FLPSPLFFFL

SEQ ID NO: 149 - protein, 10 aa, Hepatitis B virus
FLPVDFFPSI

SEQ ID NO: 150 - protein, 10 aa, Hepatitis B virus
FLPVDFFPSV

SEQ ID NO: 151 - protein, 9 aa, Human gammaherpesvirus 4
FLRGRAYGL

SEQ ID NO: 152 - protein, 9 aa, Zaire ebolavirus
FLSFASLFL

SEQ ID NO: 153 - protein, 9 aa, Trypanosoma cruzi
FLSHDFTLV

SEQ ID NO: 154 - protein, 9 aa, Trypanosoma cruzi
FLSHNFTLV

SEQ ID NO: 155 - protein, 10 aa, Hepatitis B virus
FLPNDFFPSA

SEQ ID NO: 156 - protein, 9 aa, Vaccinia virus
FLTSVINRV

SEQ ID NO: 157 - protein, 9 aa, Human alphaherpesvirus 2
FLVDAIVRV

SEQ ID NO: 158 - protein, 10 aa, Human alphaherpesvirus 2
FLVDAIVRVA

SEQ ID NO: 159 - protein, 9 aa, Vaccinia virus
FLVIAINAM

SEQ ID NO: 160 - protein, 8 aa, Human gammaherpesvirus 4
FLYALALL

SEQ ID NO: 161 - protein, 8 aa, Human gammaherpesvirus 4
FLYALALL

SEQ ID NO: 162 - protein, 9 aa, Homo sapiens
FLYGALLLA

SEQ ID NO: 163 - protein, 9 aa, Francisella tularensis
FMPKVNFEV

SEQ ID NO: 164 - protein, 9 aa, Human gammaherpesvirus 4
FMVFLQTHI

SEQ ID NO: 165 - protein, 9 aa, Influenza A virus
FMYSDFHFI

SEQ ID NO: 166 - protein, 10 aa, Homo sapiens
FPPSPLFFFL

SEQ ID NO: 167 - protein, 9 aa, Trypanosoma cruzi
FTLVAPVSI

SEQ ID NO: 168 - protein, 9 aa, Trypanosoma cruzi
FTSAVLLLV

SEQ ID NO: 169 - protein, 9 aa, Vaccinia virus
FVDVIIIKV

SEQ ID NO: 170 - protein, 9 aa, Trypanosoma cruzi
FVDYNFSLV

SEQ ID NO: 171 - protein, 9 aa, Trypanosoma cruzi
FVDYNFTIV

SEQ ID NO: 172 - protein, 9 aa, Homo sapiens
FVFDRPLPV

SEQ ID NO: 173 - protein, 9 aa, Homo sapiens
FVFLRNFSL

SEQ ID NO: 174 - protein, 10 aa, Vaccinia virus
FVNFNSVKNL

SEQ ID NO: 175 - protein, 10 aa, Trypanosoma cruzi
FVNFNSVKNL

SEQ ID NO: 176 - protein, 9 aa, Trypanosoma cruzi
FVNHDFTVV

SEQ ID NO: 177 - protein, 9 aa, Trypanosoma cruzi
FVNYDFALV

SEQ ID NO: 178 - protein, 9 aa, Trypanosoma cruzi
FVNYDFTIV

SEQ ID NO: 179 - protein, 9 aa, Trypanosoma cruzi
FVNYDFTIV

SEQ ID NO: 180 - protein, 9 aa, Trypanosoma cruzi
FVSCDFTIV

SEQ ID NO: 181 - protein, 10 aa, Human alphaherpesvirus 2
GFLIAYQPLL

SEQ ID NO: 182 - protein, 9 aa, Plasmodium falciparum
GIAGGLALL

SEQ ID NO: 183 - protein, 9 aa, Coxsackievirus B
GIIYIIYKL

SEQ ID NO: 184 - protein, 9 aa, Influenza A virus
GILGFVFTL

SEQ ID NO: 185 - protein, 10 aa, Influenza A virus
GILGFVFTLT

SEQ ID NO: 186 - protein, 9 aa, Mycobacterium tuberculosis
GILTVSVAV

SEQ ID NO: 187 - protein, 9 aa, Human alphaherpesvirus 2
GLADTVVAC

SEQ ID NO: 188 - protein, 11 aa, Homo sapiens
GLAPPQHLIRV

SEQ ID NO: 189 - protein, 9 aa, Homo sapiens
GLATDVQTV

SEQ ID NO: 190 - protein, 9 aa, Human parvovirus B19
GLCPHCINV

SEQ ID NO: 191 - protein, 10 aa, Human parvovirus B19
GLCPHCINVG

SEQ ID NO: 192 - protein, 9 aa, Human gammaherpesvirus 4
GLCTLVAML

SEQ ID NO: 193 - protein, 9 aa, Hantaan virus
GLDCARLEI

SEQ ID NO: 194 - protein, 9 aa, Vaccinia virus
GLFDFVNFV

SEQ ID NO: 195 - protein, 10 aa, Influenza A virus
GLFGAIAGFI

SEQ ID NO: 196 - protein, 9 aa, Artificial Sequence
  UNKNOWN
GLFGGGGGV

SEQ ID NO: 197 - protein, 9 aa, Yellow fever virus
GLFGGLNWI

SEQ ID NO: 198 - protein, 9 aa, Hepatitis C virus
GLGWVGWLL

SEQ ID NO: 199 - protein, 10 aa, Mycobacterium tuberculosis
GLIDIAPHQI

SEQ ID NO: 200 - protein, 12 aa, Mycobacterium tuberculosis
GLIDIAPHQISS

SEQ ID NO: 201 - protein, 9 aa, Homo sapiens
GLIEKNIEL

SEQ ID NO: 202 - protein, 9 aa, Plasmodium falciparum
GLIMVLSFL

SEQ ID NO: 203 - protein, 9 aa, Influenza A virus
GLISLILQI

SEQ ID NO: 204 - protein, 10 aa, Hepatitis C virus
GLLGCIITSL

SEQ ID NO: 205 - protein, 14 aa, Artificial Sequence
  Unknown
GLLGFVFTLMCMGL

SEQ ID NO: 206 - protein, 9 aa, Plasmodium falciparum
GLLGNVSTV

SEQ ID NO: 207 - protein, 9 aa, Homo sapiens
GLLGTLVQL

SEQ ID NO: 208 - protein, 9 aa, Mycobacterium tuberculosis
GLLHHAPSL

SEQ ID NO: 209 - protein, 10 aa, Trypanosoma cruzi
GLLLLGLWGT

SEQ ID NO: 210 - protein, 9 aa, Human T-lymphotropic virus 1
GLLPFHSTL

SEQ ID NO: 211 - protein, 10 aa, Trypanosoma cruzi
GLLPSLLLLL

SEQ ID NO: 212 - protein, 9 aa, Homo sapiens
GLLRVISGV

SEQ ID NO: 213 - protein, 10 aa, Trypanosoma cruzi
GLMNNAFEWI

SEQ ID NO: 214 - protein, 9 aa, SARS coronavirus TJF
GLMWLSYFV

SEQ ID NO: 215 - protein, 9 aa, Vaccinia virus
GLNDYLHSV

SEQ ID NO: 216 - protein, 9 aa, Mycobacterium tuberculosis
GLPVEYLQV

SEQ ID NO: 217 - protein, 9 aa, Hepatitis C virus
GLQDCTMLV

SEQ ID NO: 218 - protein, 10 aa, Hepatitis B virus
GLSAMSTTDL

SEQ ID NO: 219 - protein, 9 aa, human herpesvirus 1
GLSISGNLL

SEQ ID NO: 220 - protein, 10 aa, Hepatitis B virus
GLSPTVWLSA

SEQ ID NO: 221 - protein, 10 aa, Hepatitis B virus
GLSPTVWLSV

SEQ ID NO: 222 - protein, 9 aa, Hepatitis B virus
GLSRYVARL

SEQ ID NO: 223 - protein, 10 aa, Plasmodium vivax
GLVILLVLAL

SEQ ID NO: 224 - protein, 9 aa, Yellow fever virus
GLYGNGILV

SEQ ID NO: 225 - protein, 9 aa, Homo sapiens
GLYPGLIWL

SEQ ID NO: 226 - protein, 9 aa, Homo sapiens
GLYSGVTTV

SEQ ID NO: 227 - protein, 9 aa, H5N1 subtype
GMDPRMCSL

SEQ ID NO: 228 - protein, 9 aa, Mycobacterium tuberculosis
GMGPSLIGL

SEQ ID NO: 229 - protein, 9 aa, H5N1 subtype
GMLGFVFTL

SEQ ID NO: 230 - protein, 9 aa, SARS coronavirus
GMSRIGMEV

SEQ ID NO: 231 - protein, 9 aa, Human papillomavirus type 16
GTLGIVCPI

SEQ ID NO: 232 - protein, 9 aa, Hepatitis C virus
GVRVLEDGV

SEQ ID NO: 233 - protein, 10 aa, Homo sapiens
GVYDGEEHSV

SEQ ID NO: 234 - protein, 8 aa, Plasmodium falciparum
HLGNKYLV

SEQ ID NO: 235 - protein, 9 aa, Plasmodium falciparum
HLGNVKYLV

SEQ ID NO: 236 - protein, 9 aa, Measles virus
HLMIDRPYV

SEQ ID NO: 237 - protein, 9 aa, Hepatitis B virus
HLSLRGLFV

SEQ ID NO: 238 - protein, 9 aa, Hepatitis B virus
HLSLRGLPV

SEQ ID NO: 239 - protein, 9 aa, Hepatitis C virus
HMWNFISGI

SEQ ID NO: 240 - protein, 9 aa, Human papillomavirus type 44
HNNGICWGN

SEQ ID NO: 241 - protein, 11 aa, Human gammaherpesvirus 4
HPVGEADYFEY

SEQ ID NO: 242 - protein, 9 aa, Vaccinia virus
HVDGKILFV

SEQ ID NO: 243 - protein, 9 aa, Trypanosoma cruzi
IAGGVMAVV

SEQ ID NO: 244 - protein, 10 aa, Human betaherpesvirus 5
IAGNSAYEYV

SEQ ID NO: 245 - protein, 9 aa, Trypanosoma cruzi
IANYNFTLV

SEQ ID NO: 246 - protein, 10 aa, Vaccinia virus
IIIPFIAYFV

SEQ ID NO: 247 - protein, 10 aa, Trypanosoma cruzi
IILNGSLLTL

SEQ ID NO: 248 - protein, 9 aa, Yellow fever virus
IIMDEAHFL

SEQ ID NO: 249 - protein, 9 aa, Hepatitis C virus
ILAGYGAGV

SEQ ID NO: 250 - protein, 9 aa, Vaccinia virus
ILDDNLYKV

SEQ ID NO: 251 - protein, 9 aa, Human betaherpesvirus 5
ILDEERDKV

SEQ ID NO: 252 - protein, 9 aa, Homo sapiens
ILDKKVEKV

SEQ ID NO: 253 - protein, 9 aa, Homo sapiens
ILDQKINEV

SEQ ID NO: 254 - protein, 9 aa, Hepatitis C virus
ILDSFDPLV

SEQ ID NO: 255 - protein, 9 aa, Homo sapiens
ILDSVGIEA

SEQ ID NO: 256 - protein, 10 aa, Influenza A virus
ILGFVFTLTV

SEQ ID NO: 257 - protein, 8 aa, Hepatitis C virus
ILHTPGCV

SEQ ID NO: 258 - protein, 9 aa, Human immunodeficiency virus
ILKEPVHGV

SEQ ID NO: 259 - protein, 9 aa, Homo sapiens
ILLAELEQL

SEQ ID NO: 260 - protein, 9 aa, Hantaan orthohantavirus
ILLGSLSDL

SEQ ID NO: 261 - protein, 9 aa, SARS coronavirus
ILLNKHIDA

SEQ ID NO: 262 - protein, 9 aa, West Nile virus
ILLWEIPDV

SEQ ID NO: 263 - protein, 9 aa, Homo sapiens
ILMEHIHKL

SEQ ID NO: 264 - protein, 10 aa, Vaccinia virus
ILMIFISSFL

SEQ ID NO: 265 - protein, 10 aa, Coxsackievirus
ILMNDQEVGV

SEQ ID NO: 266 - protein, 9 aa, JC virus
ILMWEAVTL

SEQ ID NO: 267 - protein, 9 aa, Human respiratory syncytial virus
ILNNPKASL

SEQ ID NO: 268 - protein, 9 aa, SARS coronavirus
ILPDPLKPT

SEQ ID NO: 269 - protein, 10 aa, Measles virus
ILPGQDLQYV

SEQ ID NO: 270 - protein, 9 aa, Hantaan virus
ILPSKSLEV

SEQ ID NO: 271 - protein, 9 aa, Homo sapiens
ILQDGRIFI

SEQ ID NO: 272 - protein, 9 aa, Hantaan virus
ILQDMRNTI

SEQ ID NO: 273 - protein, 9 aa, Vaccinia virus
ILSDENYLL

SEQ ID NO: 274 - protein, 9 aa, Hepatitis B virus
ILSPFLPLL

SEQ ID NO: 275 - protein, 10 aa, Plasmodium falciparum
ILSVSSFLFV

SEQ ID NO: 276 - protein, 9 aa, Homo sapiens
ILTDITKGV

SEQ ID NO: 277 - protein, 9 aa, Homo sapiens
ILTVILGVL

SEQ ID NO: 278 - protein, 10 aa, H1N1 swine influenza virus
IMDKNIILKA

SEQ ID NO: 279 - protein, 9 aa, Homo sapiens
IMDQVPFSV

SEQ ID NO: 280 - protein, 9 aa, Hantaan virus
IMELATAGI

SEQ ID NO: 281 - protein, 9 aa, Artificial Sequence
  unknown
IMIGHLVGV

SEQ ID NO: 282 - protein, 9 aa, Homo sapiens
IMIGVLVGV

SEQ ID NO: 283 - protein, 8 aa, Homo sapiens
MLEALERV

SEQ ID NO: 284 - protein, 9 aa, Artificial Sequence
  unknown
IMMGVLVGV

SEQ ID NO: 285 - protein, 9 aa, Francisella tularensis
IMSSFEFQV

SEQ ID NO: 286 - protein, 9 aa, Plasmodium falciparum
IMVLSFLFL

SEQ ID NO: 287 - protein, 9 aa, Mycobacterium tuberculosis
IMYNYPAML

SEQ ID NO: 288 - protein, 9 aa, Homo sapiens
ITDQVPFSV

SEQ ID NO: 289 - protein, 9 aa, Vaccinia virus
IVIEAIHTV

SEQ ID NO: 290 - protein, 9 aa, Hepatitis B virus
IVSPFIPLL

SEQ ID NO: 291 - protein, 12 aa, Influenza A virus
KGILGFVFTLTV

SEQ ID NO: 292 - protein, 9 aa, Vaccinia virus
KIDYYIPYV

SEQ ID NO: 293 - protein, 9 aa, Vaccinia virus
KIEDLINQL

SEQ ID NO: 294 - protein, 9 aa, Homo sapiens
KIFGSLAFL

SEQ ID NO: 295 - protein, 9 aa, Plasmodium falciparum
KILSVFFLA

SEQ ID NO: 296 - protein, 9 aa, Vaccinia virus
KINIFMAFL

SEQ ID NO: 297 - protein, 9 aa, Dengue virus type 2
KLAEAIFKL

SEQ ID NO: 298 - protein, 9 aa, Mycobacterium tuberculosis
KLAGGVAVI

SEQ ID NO: 299 - protein, 9 aa, Human polyomavirus 1
KLCTFSFLI

SEQ ID NO: 300 - protein, 9 aa, Hepatitis D virus
KLEDENPWL

SEQ ID NO: 301 - protein, 9 aa, Hepatitis D virus
KLEDLERDL

SEQ ID NO: 302 - protein, 9 aa, Trypanosoma cruzi
KLFPEVIDL

SEQ ID NO: 303 - protein, 9 aa, Vaccinia virus
KLFTHDIML

SEQ ID NO: 304 - protein, 9 aa, Influenza B virus
KLGEFYNQM

SEQ ID NO: 305 - protein, 9 aa, Francisella tularensis
KLGGYVSFV

SEQ ID NO: 306 - protein, 10 aa, Homo sapiens
KLHEEEIQEL

SEQ ID NO: 307 - protein, 9 aa, Mycobacterium tuberculosis
KLIANNTRV

SEQ ID NO: 308 - protein, 9 aa, Homo sapiens
KLKDVLLQV

SEQ ID NO: 309 - protein, 9 aa, Plasmodium falciparum
KLKEFIPKV

SEQ ID NO: 310 - protein, 9 aa, Plasmodium falciparum
KLKKIKNSI

SEQ ID NO: 311 - protein, 9 aa, Plasmodium falciparum
KLKKIKNSL

SEQ ID NO: 312 - protein, 10 aa, Homo sapiens
KLLEGEEERL

SEQ ID NO: 313 - protein, 10 aa, Homo sapiens
KLLEGEESRI

SEQ ID NO: 314 - protein, 9 aa, Francisella tularensis
KLLGQINLV

SEQ ID NO: 315 - protein, 9 aa, Francisella tularensis
KLLPEGYWV

SEQ ID NO: 316 - protein, 10 aa, SARS coronavirus
KLPDDFMGCV

SEQ ID NO: 317 - protein, 9 aa, Human papillomavirus type 18
KLPDLCTEL

SEQ ID NO: 318 - protein, 9 aa, Human papillomavirus type 16
KLPQLCTEL

SEQ ID NO: 319 - protein, 9 aa, Plasmodium falciparum
KLQEQQSDL

SEQ ID NO: 320 - protein, 9 aa, Mycobacterium tuberculosis
KLQERLAKL

SEQ ID NO: 321 - protein, 10 aa, Plasmodium falciparum
KLRKPKHKKL

SEQ ID NO: 322 - protein, 9 aa, H5N1 subtype
KLSDYEGRL

SEQ ID NO: 323 - protein, 10 aa, Hepatitis C virus
KLSGLGINAV

SEQ ID NO: 324 - protein, 10 aa, Hepatitis C virus
KLSGLGLNAV

SEQ ID NO: 325 - protein, 10 aa, Hepatitis C virus
KLSSLGLNAV

SEQ ID NO: 326 - protein, 10 aa, Hepatitis C virus
KLVALGINAV

SEQ ID NO: 327 - protein, 10 aa, Hepatitis C virus
KLVALGVNAV

SEQ ID NO: 328 - protein, 10 aa, Hepatitis C virus
KLVAMGINAV

SEQ ID NO: 329 - protein, 9 aa, Mycobacterium tuberculosis
KLVANNTRL

SEQ ID NO: 330 - protein, 10 aa, Hepatitis C virus
KLVSLGVNAV

SEQ ID NO: 331 - protein, 10 aa, Hepatitis C virus
KLVVLGINAV

SEQ ID NO: 332 - protein, 9 aa, Measles virus
KLWCRHFCV

SEQ ID NO: 333 - protein, 9 aa, Measles virus
KLWESPQEI

SEQ ID NO: 334 - protein, 9 aa, Trypanosoma cruzi
KLYCSYEVA

SEQ ID NO: 335 - protein, 10 aa, Influenza A virus
KLYQNPTTYI

SEQ ID NO: 336 - protein, 9 aa, Human respiratory syncytial virus
KMLKEMGEV

SEQ ID NO: 337 - protein, 9 aa, Vaccinia virus
KMTLFKSIL

SEQ ID NO: 338 - protein, 9 aa, Homo sapiens
KMVELVHFL

SEQ ID NO: 339 - protein, 9 aa, Plasmodium falciparum
KNKEKALII

SEQ ID NO: 340 - protein, 10 aa, Trypanosoma cruzi
KTWADEYLCV

SEQ ID NO: 341 - protein, 9 aa, Homo sapiens
KTWGQYWQV

SEQ ID NO: 342 - protein, 9 aa, Artificial Sequence
  unknown
KVAEIVHFL

SEQ ID NO: 343 - protein, 9 aa, Homo sapiens
KVAELVHFL

SEQ ID NO: 344 - protein, 9 aa, Artificial Sequence
  unknown
KVAELVWFL

SEQ ID NO: 345 - protein, 9 aa, Vaccinia virus
KVDDTFYYV

SEQ ID NO: 346 - protein, 9 aa, Homo sapiens
KVLEYVIKV

SEQ ID NO: 347 - protein, 10 aa, Hepatitis C virus
KVLHKRTLGL

SEQ ID NO: 348 - protein, 9 aa, Trypanosoma cruzi
KVVSLVILA

SEQ ID NO: 349 - protein, 9 aa, Homo sapiens
KYPENFFLL

SEQ ID NO: 350 - protein, 9 aa, SARS coronavirus
LALLLLDRL

SEQ ID NO: 351 - protein, 9 aa, Mycobacterium tuberculosis
LFAAFPSFA

SEQ ID NO: 352 - protein, 8 aa, Human T-lymphotropic virus 1
LFGYPVYV

SEQ ID NO: 353 - protein, 9 aa, Homo sapiens
LGYGFVNYI

SEQ ID NO: 354 - protein, 9 aa, Homo sapiens
LGYGFVNYV

SEQ ID NO: 355 - protein, 9 aa, H5N1 subtype
LIFLARSAL

SEQ ID NO: 356 - protein, 9 aa, Vaccinia virus
LIQEIVHEV

SEQ ID NO: 357 - protein, 9 aa, SARS coronavirus
LITGRLQSL

SEQ ID NO: 358 - protein, 10 aa, Hepatitis C virus
LLALLSCLTV

SEQ ID NO: 359 - protein, 10 aa, Mycobacterium tuberculosis
LLAVLTAAPL

SEQ ID NO: 360 - protein, 9 aa, Hepatitis B virus
LLCLIFLLV

SEQ ID NO: 361 - protein, 9 aa, Hepatitis C virus
LLCPAGHAV

SEQ ID NO: 362 - protein, 9 aa, Mycobacterium tuberculosis
LLDAHIPQL

SEQ ID NO: 363 - protein, 9 aa, Mycobacterium tuberculosis
LLDEGKQSL

SEQ ID NO: 364 - protein, 9 aa, Homo sapiens
LLDEPTNHL

SEQ ID NO: 365 - protein, 10 aa, Human gammaherpesvirus 4
LLDFVRFMGV

SEQ ID NO: 366 - protein, 9 aa, Homo sapiens
LLDVPTAAV

SEQ ID NO: 367 - protein, 8 aa, Homo sapiens
LLDVTAAV

SEQ ID NO: 368 - protein, 10 aa, Hepatitis B virus
LLDYQGMLPV

SEQ ID NO: 369 - protein, 9 aa, Human T-lymphotropic virus 1
LLFEEYTNI

SEQ ID NO: 370 - protein, 9 aa, Human T-lymphotropic virus 1
LLFGHPVYV

SEQ ID NO: 371 - protein, 9 aa, Human T-lymphotropic virus 1
LLFGYAVYV

SEQ ID NO: 372 - protein, 9 aa, Human T-lymphotropic virus 1
LLFGYPRYV

SEQ ID NO: 373 - protein, 9 aa, Human T-lymphotropic virus 1
LLFGYPVAV

SEQ ID NO: 374 - protein, 9 aa, Human T-lymphotropic virus 1
LLFGYPVYV

SEQ ID NO: 375 - protein, 10 aa, Hepatitis C virus
LLFNILGGWV

SEQ ID NO: 376 - protein, 9 aa, Hepatitis C virus
LLGCIITSL

SEQ ID NO: 377 - protein, 10 aa, Trypanosoma cruzi
LLGLWGLATA

SEQ ID NO: 378 - protein, 10 aa, Trypanosoma cruzi
LLGLWGLTGL

SEQ ID NO: 379 - protein, 10 aa, Trypanosoma cruzi
LLGLWGTAAL

SEQ ID NO: 380 - protein, 10 aa, Trypanosoma cruzi
LLGLWVFAAL

SEQ ID NO: 381 - protein, 9 aa, Homo sapiens
LLGRNSFEV

SEQ ID NO: 382 - protein, 9 aa, Human parvovirus B19
LLHTDFEQV

SEQ ID NO: 383 - protein, 10 aa, Human parvovirus B19
LLHTDFEQVM

SEQ ID NO: 384 - protein, 9 aa, SARS coronavirus
LLLDRLNQL

SEQ ID NO: 385 - protein, 10 aa, Homo sapiens
LLLDVPTAAV

SEQ ID NO: 386 - protein, 12 aa, Homo sapiens
LLLDVPTAAVQA

SEQ ID NO: 387 - protein, 10 aa, Homo sapiens
LLLDVTPLSL

SEQ ID NO: 388 - protein, 10 aa, Trypanosoma cruzi
LLLGLWGTAA

SEQ ID NO: 389 - protein, 9 aa, Human polyomavirus 1
LLLIWFRPV

SEQ ID NO: 390 - protein, 9 aa, Trypanosoma cruzi
LLLLGLWGL

SEQ ID NO: 391 - protein, 9 aa, Plasmodium falciparum
LLMDCSGSI

SEQ ID NO: 392 - protein, 9 aa, Human papillomavirus type 16
LLMGTLGIV

SEQ ID NO: 393 - protein, 9 aa, Human polyomavirus 1
LLMWEAVTV

SEQ ID NO: 394 - protein, 9 aa, Human immunodeficiency virus type 1
LLNATDIAV

SEQ ID NO: 395 - protein, 9 aa, Human gammaherpesvirus 8
LLNGWRWRL

SEQ ID NO: 396 - protein, 9 aa, herpes simplex virus 7
LLPPELSET

SEQ ID NO: 397 - protein, 9 aa, Hepatitis C virus
LLPRRGPRL

SEQ ID NO: 398 - protein, 10 aa, Homo sapiens
LLQDSVDFSL

SEQ ID NO: 399 - protein, 9 aa, Homo sapiens
LLSAEPVPA

SEQ ID NO: 400 - protein, 10 aa, Mycobacterium tuberculosis
LLSVLAAVGL

SEQ ID NO: 401 - protein, 9 aa, Influenza A virus
LLTEVETYV

SEQ ID NO: 402 - protein, 9 aa, Trypanosoma cruzi
LLTTSGVSA

SEQ ID NO: 403 - protein, 9 aa, Human gammaherpesvirus 4
LLVDLLWLL

SEQ ID NO: 404 - protein, 9 aa, Human herpesvirus 4
LLWAARPRL

SEQ ID NO: 405 - protein, 9 aa, Measles virus
LLWSYAMGV

SEQ ID NO: 406 - protein, 8 aa, Human herpesvirus 4
LLWTLVVL

SEQ ID NO: 407 - protein, 9 aa, Human gammaherpesvirus 4
LLWTLVVLL

SEQ ID NO: 408 - protein, 9 aa, Human T-lymphotropic virus 2
LLYGYPVYV

SEQ ID NO: 409 - protein, 10 aa, Trypanosoma cruzi
LLYSDDALHL

SEQ ID NO: 410 - protein, 9 aa, herpes simplex virus 7
LMHAPAFET

SEQ ID NO: 411 - protein, 9 aa, Measles virus
LMIDRPYVL

SEQ ID NO: 412 - protein, 9 aa, Mycobacterium tuberculosis
LMIGTAAAV

SEQ ID NO: 413 - protein, 9 aa, Human herpesvirus 4
LMIIPLINV

SEQ ID NO: 414 - protein, 9 aa, Homo sapiens
LMLGEFLKL

SEQ ID NO: 415 - protein, 9 aa, Macaca mulatta
LMLIWYRPV

SEQ ID NO: 416 - protein, 9 aa, Human betaherpesvirus 5
LMNGQQIFL

SEQ ID NO: 417 - protein, 9 aa, Trypanosoma cruzi
LMNNAFEWI

SEQ ID NO: 418 - protein, 10 aa, Trypanosoma cruzi
LMNNAFEWIV

SEQ ID NO: 419 - protein, 9 aa, Francisella tularensis
LMWDNVGLV

SEQ ID NO: 420 - protein, 9 aa, Human gammaherpesvirus 8
LMWYELSKI

SEQ ID NO: 421 - protein, 10 aa, Human gammaherpesvirus 8
LMWYELSKIN

SEQ ID NO: 422 - protein, 9 aa, Vaccinia virus
LNIMNKLNI

SEQ ID NO: 423 - protein, 9 aa, Dengue virus type 1
LPAIVREAI

SEQ ID NO: 424 - protein, 9 aa, SARS coronavirus
LQLPQGTTL

SEQ ID NO: 425 - protein, 9 aa, Human papillomavirus type 16
LQTTIHDII

SEQ ID NO: 426 - protein, 10 aa, Homo sapiens
LVALLACLTV

SEQ ID NO: 427 - protein, 10 aa, Homo sapiens
LVALLVCLTV

SEQ ID NO: 428 - protein, 11 aa, Hepatitis C virus
LSPYYKRYISW

SEQ ID NO: 429 - protein, 9 aa, Human immunodeficiency virus type 1
LVGPTPVNI

SEQ ID NO: 430 - protein, 9 aa, Hepatitis C virus
LVMAQLLRI

SEQ ID NO: 431 - protein, 9 aa, Mycobacterium tuberculosis
LVVADLSFI

SEQ ID NO: 432 - protein, 9 aa, Homo sapiens
MIMQGGFSV

SEQ ID NO: 433 - protein, 9 aa, Plasmodium falciparum
MINAYLDKL

SEQ ID NO: 434 - protein, 9 aa, Hepatitis C virus
MLAAQMFIV

SEQ ID NO: 435 - protein, 9 aa, Human papillomavirus type 16
MLDLQPETT

SEQ ID NO: 436 - protein, 9 aa, Homo sapiens
MLGTHTMEV

SEQ ID NO: 437 - protein, 9 aa, Dengue virus
MLLALIAVL

SEQ ID NO: 438 - protein, 9 aa, Homo sapiens
MLLAVLYCL

SEQ ID NO: 439 - protein, 9 aa, Human betaherpesvirus 5
MLNIPSINV

SEQ ID NO: 440 - protein, 10 aa, Vaccinia virus
MLVSQALNSV

SEQ ID NO: 441 - protein, 9 aa, Saccharomyces cerevisiae
MLWGYLQYV

SEQ ID NO: 442 - protein, 9 aa, Homo sapiens
MMAKEEELV

SEQ ID NO: 443 - protein, 9 aa, Dermatophagoides pteronyssinus
MMIEEYPYV

SEQ ID NO: 444 - protein, 9 aa, Vaccinia virus
MMLVPLITV

SEQ ID NO: 445 - protein, 9 aa, Hepatitis C virus
MMMNWSPTT

SEQ ID NO: 446 - protein, 10 aa, Plasmodium falciparum
MMRKLAILSV

SEQ ID NO: 447 - protein, 9 aa, Vaccinia virus
MPAYIRNTL

SEQ ID NO: 448 - protein, 9 aa, Plasmodium falciparum
MPNDPNRNV

SEQ ID NO: 449 - protein, 9 aa, Plasmodium falciparum
MPNNPNRNV

SEQ ID NO: 450 - protein, 9 aa, Mycobacterium tuberculosis
MTYAAPLFV

SEQ ID NO: 451 - protein, 9 aa, Homo sapiens
MVDGTLLLL

SEQ ID NO: 452 - protein, 9 aa, H5N1 subtype
MVDGTLLLL

SEQ ID NO: 453 - protein, 9 aa, Human gammaherpesvirus 8
MWYELSKIN

SEQ ID NO: 454 - protein, 9 aa, Hepatitis C virus
NEGCGWAGW

SEQ ID NO: 455 - protein, 9 aa, Homo sapiens
NEGCGWAGW

SEQ ID NO: 456 - protein, 9 aa, Vaccinia virus
NEGCGWAGW

SEQ ID NO: 457 - protein, 9 aa, Mycobacterium tuberculosis
NLLVTGFDT

SEQ ID NO: 458 - protein, 9 aa, Human gammaherpesvirus 8
NLMWYELSK

SEQ ID NO: 459 - protein, 10 aa, Human gammaherpesvirus 8
NLMWYELSKI

SEQ ID NO: 460 - protein, 9 aa, Plasmodium falciparum
NLNDNAIHL

SEQ ID NO: 461 - protein, 9 aa, SARS coronavirus
NLNESLIDL

SEQ ID NO: 462 - protein, 9 aa, Hepatitis C virus
NLPGCSFSI

SEQ ID NO: 463 - protein, 9 aa, Human betaherpesvirus 5
NLVPIVATV

SEQ ID NO: 464 - protein, 9 aa, Human betaherpesvirus 5
NLVPMVATV

SEQ ID NO: 465 - protein, 9 aa, Homo sapiens
NLYPFVKTV

SEQ ID NO: 466 - protein, 9 aa, Influenza A virus
NMLSTVLGV

SEQ ID NO: 467 - protein, 10 aa, Plasmodium falciparum
NMPNDPNRNV

SEQ ID NO: 468 - protein, 9 aa, Homo sapiens
NQFPGFKEV

SEQ ID NO: 469 - protein, 9 aa, Human T-lymphotropic virus 1
PLFGYPVYV

SEQ ID NO: 470 - protein, 11 aa, Human betaherpesvirus 5
PSQEPMSIYVY

SEQ ID NO: 471 - protein, 9 aa, Human gammaherpesvirus 4
PYLFWLAAI

SEQ ID NO: 472 - protein, 9 aa, Dengue virus
QEGAMHTAL

SEQ ID NO: 473 - protein, 9 aa, Hepatitis B virus
QLDPARDVL

SEQ ID NO: 474 - protein, 9 aa, Homo sapiens
QLFNHTMFI

SEQ ID NO: 475 - protein, 9 aa, Human T-lymphotropic virus 1
QLGAFLTNV

SEQ ID NO: 476 - protein, 10 aa, Triticum aestivum
QLIPCMDVVL

SEQ ID NO: 477 - protein, 9 aa, Human respiratory syncytial virus
QLLSSSKYT

SEQ ID NO: 478 - protein, 9 aa, Homo sapiens
QLMAEKLQL

SEQ ID NO: 479 - protein, 9 aa, Measles virus
QLPEATFMV

SEQ ID NO: 480 - protein, 10 aa, Hepatitis C virus
QLRRHIDLLV

SEQ ID NO: 481 - protein, 10 aa, Trypanosoma cruzi
QMDYSNGLFV

SEQ ID NO: 482 - protein, 9 aa, Hepatitis C virus
QMWKCLIRL

SEQ ID NO: 483 - protein, 9 aa, Human betaherpesvirus 5
QMWQARLTV

SEQ ID NO: 484 - protein, 9 aa, Human betaherpesvirus 5
QYDPVAALF

SEQ ID NO: 485 - protein, 8 aa, Human gammaherpesvirus 4
RAKFKQLL

SEQ ID NO: 486 - protein, 9 aa, Homo sapiens
RALAETSYV

SEQ ID NO: 487 - protein, 9 aa, Human gammaherpesvirus 8
RDNLMWYEL

SEQ ID NO: 488 - protein, 10 aa, Human immunodeficiency virus
RGPGRAFVTI

SEQ ID NO: 489 - protein, 9 aa, human herpesvirus 1
RIFAELEGV

SEQ ID NO: 490 - protein, 9 aa, Homo sapiens
RLAVYIDKV

SEQ ID NO: 491 - protein, 9 aa, Homo sapiens
RLAVYIDRV

SEQ ID NO: 492 - protein, 10 aa, West Nile virus
RLDDDGNFQL

SEQ ID NO: 493 - protein, 9 aa, Measles virus
RLERKWLDV

SEQ ID NO: 494 - protein, 9 aa, herpes simplex virus 7
RLGAVILFV

SEQ ID NO: 495 - protein, 9 aa, Francisella tularensis
RLIGHISTL

SEQ ID NO: 496 - protein, 9 aa, H5N1 subtype
RLIQNSITI

SEQ ID NO: 497 - protein, 10 aa, Hepatitis C virus
RLIVFPDLGV

SEQ ID NO: 498 - protein, 10 aa, Hepatitis C virus
RLLLLGLLLL

SEQ ID NO: 499 - protein, 10 aa, Trypanosoma cruzi
RLLPSLLLLL

SEQ ID NO: 500 - protein, 9 aa, human herpesvirus 1
RLLQTGIHV

SEQ ID NO: 501 - protein, 9 aa, Trypanosoma cruzi
RLLSPTTIV

SEQ ID NO: 502 - protein, 9 aa, Homo sapiens
RLMKQDFSV

SEQ ID NO: 503 - protein, 9 aa, SARS coronavirus
RLNEVAKNL

SEQ ID NO: 504 - protein, 9 aa, Homo sapiens
RLNKVISEL

SEQ ID NO: 505 - protein, 9 aa, SARS coronavirus
RLNQLESKV

SEQ ID NO: 506 - protein, 9 aa, Mycobacterium tuberculosis
RLPLVLPAV

SEQ ID NO: 507 - protein, 10 aa, Measles virus
RLSDNGYYTV

SEQ ID NO: 508 - protein, 11 aa, Human betaherpesvirus 5
RLTVSGLAWTR

SEQ ID NO: 509 - protein, 9 aa, Hepatitis C virus
RLWHYPCTI

SEQ ID NO: 510 - protein, 9 aa, Hepatitis C virus
RLWHYPCTV

SEQ ID NO: 511 - protein, 9 aa, Vaccinia virus
RLYDYFTRV

SEQ ID NO: 512 - protein, 9 aa, Homo sapiens
RMFPNAPYL

SEQ ID NO: 513 - protein, 9 aa, Influenza A virus
RMGAVTTEV

SEQ ID NO: 514 - protein, 9 aa, Homo sapiens
RMLPHAPGV

SEQ ID NO: 515 - protein, 9 aa, Measles virus
RMSKGVFKV

SEQ ID NO: 516 - protein, 11 aa, Human betaherpesvirus 5
RNLVPMVATVQ

SEQ ID NO: 517 - protein, 11 aa, Human betaherpesvirus 5
RPHERNGFTVL

SEQ ID NO: 518 - protein, 10 aa, Vaccinia virus
RPMSLRSTII

SEQ ID NO: 519 - protein, 9 aa, Measles virus
RRYPDAVYL

SEQ ID NO: 520 - protein, 10 aa, Hepatitis C virus
RVLEDGVNYA

SEQ ID NO: 521 - protein, 9 aa, Homo sapiens
RVPGVAPTL

SEQ ID NO: 522 - protein, 9 aa, Vaccinia virus
RVYEALYYV

SEQ ID NO: 523 - protein, 11 aa, Hepatitis C virus
SECTTPCSGSW

SEQ ID NO: 524 - protein, 9 aa, Human T-lymphotropic virus 1
SFHSLHLLF

SEQ ID NO: 525 - protein, 9 aa, Homo sapiens
SIIGRLLEV

SEQ ID NO: 526 - protein, 9 aa, JC virus
SITEVECFL

SEQ ID NO: 527 - protein, 9 aa, SARS coronavirus
SIVAYTMSL

SEQ ID NO: 528 - protein, 10 aa, Hepatitis B virus
SIVSPFIPLL

SEQ ID NO: 529 - protein, 9 aa, human herpesvirus 1
SIYVYALPL

SEQ ID NO: 530 - protein, 10 aa, Homo sapiens
SLADTNSLAV

SEQ ID NO: 531 - protein, 9 aa, Homo sapiens
SLAGGIIGV

SEQ ID NO: 532 - protein, 10 aa, Influenza A virus
SLCPIRGWAI

SEQ ID NO: 533 - protein, 9 aa, Homo sapiens
SLDDYNHLV

SEQ ID NO: 534 - protein, 9 aa, Dermatophagoides pteronyssinus
SLDLAEQEL

SEQ ID NO: 535 - protein, 9 aa, Influenza A virus
SLENFRAYV

SEQ ID NO: 536 - protein, 9 aa, West Nile virus
SLFGGMSWI

SEQ ID NO: 537 - protein, 9 aa, West Nile virus
SLFGQRIEV

SEQ ID NO: 538 - protein, 9 aa, Vaccinia virus
SLFKNVRLL

SEQ ID NO: 539 - protein, 9 aa, Homo sapiens
SLFPGKLEV

SEQ ID NO: 540 - protein, 9 aa, Homo sapiens
SLGEQQYSV

SEQ ID NO: 541 - protein, 9 aa, Human gammaherpesvirus 4
SLGGLLTMV

SEQ ID NO: 542 - protein, 10 aa, Plasmodium vivax
SLGLVILLVL

SEQ ID NO: 543 - protein, 10 aa, Hepatitis C virus
SLHTGFLASL

SEQ ID NO: 544 - protein, 9 aa, Homo sapiens
SLIGHLQTL

SEQ ID NO: 545 - protein, 9 aa, Plasmodium falciparum
SLKKNSRSL

SEQ ID NO: 546 - protein, 11 aa, Hepatitis C virus
SLLAPGAKQNV

SEQ ID NO: 547 - protein, 10 aa, Homo sapiens
SLLGGDVVSV

SEQ ID NO: 548 - protein, 9 aa, Homo sapiens
SLLMWITQC

SEQ ID NO: 549 - protein, 9 aa, Homo sapiens
SLLMWITQV

SEQ ID NO: 550 - protein, 9 aa, Homo sapiens
SLLPAIVEL

SEQ ID NO: 551 - protein, 11 aa, Homo sapiens
SLLPPDALVGL

SEQ ID NO: 552 - protein, 11 aa, Homo sapiens
SLLPPTALVGL

SEQ ID NO: 553 - protein, 9 aa, Hepatitis C virus
SLMAFTAAV

SEQ ID NO: 554 - protein, 9 aa, Lymphocytic choriomeningitis virus
SLNQTVHSL

SEQ ID NO: 555 - protein, 9 aa, herpes simplex virus 7
SLPITVYYA

SEQ ID NO: 556 - protein, 9 aa, Homo sapiens
SLQEEIAFL

SEQ ID NO: 557 - protein, 9 aa, Human polyomavirus 1
SLQNSEFLL

SEQ ID NO: 558 - protein, 9 aa, Vaccinia virus
SLSAYIIRV

SEQ ID NO: 559 - protein, 9 aa, Homo sapiens
SLSEKTVLL

SEQ ID NO: 560 - protein, 9 aa, Trypanosoma cruzi
SLSHYFTLV

SEQ ID NO: 561 - protein, 9 aa, Vaccinia virus
SLSNLDFRL

SEQ ID NO: 562 - protein, 9 aa, Homo sapiens
SLSRFSWGA

SEQ ID NO: 563 - protein, 9 aa, West Nile virus
SLTSINVQA

SEQ ID NO: 564 - protein, 9 aa, Human gammaherpesvirus 4
SLVIVTTFV

SEQ ID NO: 565 - protein, 9 aa, West Nile virus
SLVNGVVRL

SEQ ID NO: 566 - protein, 9 aa, Homo sapiens
SLWGQPAEA

SEQ ID NO: 567 - protein, 9 aa, Mycobacterium tuberculosis
SLYFGGICV

SEQ ID NO: 568 - protein, 9 aa, Human immunodeficiency virus
SLYNTIAVL

SEQ ID NO: 569 - protein, 9 aa, HIV-1 M:B
SLYNTVATL

SEQ ID NO: 570 - protein, 9 aa, Mycobacterium tuberculosis
SMAGSSAMI

SEQ ID NO: 571 - protein, 9 aa, Vaccinia virus
SMHFYGWSL

SEQ ID NO: 572 - protein, 9 aa, Trypanosoma cruzi
SMNATLVQA

SEQ ID NO: 573 - protein, 9 aa, Hepatitis C virus
SMVGNWAKV

SEQ ID NO: 574 - protein, 10 aa, Hepatitis C virus
SMVGNWAKVL

SEQ ID NO: 575 - protein, 9 aa, Influenza A virus
SRYWAIRTR

SEQ ID NO: 576 - protein, 9 aa, Hepatitis B virus
STLPETTVV

SEQ ID NO: 577 - protein, 9 aa, Trypanosoma cruzi
SVFRENLFL

SEQ ID NO: 578 - protein, 9 aa, Homo sapiens
SVGGVFTSV

SEQ ID NO: 579 - protein, 11 aa, Human betaherpesvirus 5
SVMKRRIEEIC

SEQ ID NO: 580 - protein, 9 aa, Human gammaherpesvirus 4
SVRDRLARL

SEQ ID NO: 581 - protein, 9 aa, Homo sapiens
SVYDFFVWL

SEQ ID NO: 582 - protein, 10 aa, Hepatitis C virus
TARHTPVNSW

SEQ ID NO: 583 - protein, 10 aa, Hepatitis C virus
TGSPITYSTY

SEQ ID NO: 584 - protein, 10 aa, Human papillomavirus type 16
TIHDIILECV

SEQ ID NO: 585 - protein, 9 aa, Mycobacterium tuberculosis
TIPEALAAV

SEQ ID NO: 586 - protein, 9 aa, Human polyomavirus 1
TLACFAVYT

SEQ ID NO: 587 - protein, 10 aa, SARS coronavirus
TLACFVLAAV

SEQ ID NO: 588 - protein, 10 aa, Mycobacterium tuberculosis
TLAGKGISVV

SEQ ID NO: 589 - protein, 9 aa, West Nile virus
TLARGFPFV

SEQ ID NO: 590 - protein, 9 aa, Homo sapiens
TLDSQVMSL

SEQ ID NO: 591 - protein, 9 aa, Human gammaherpesvirus 4
TLDYKPLSV

SEQ ID NO: 592 - protein, 9 aa, Trypanosoma cruzi
TLEEFSAKL

SEQ ID NO: 593 - protein, 9 aa, Homo sapiens
TLEGFASPL

SEQ ID NO: 594 - protein, 9 aa, Human herpesvirus 4
TLFIGSHVV

SEQ ID NO: 595 - protein, 9 aa, Vaccinia virus
TLFPGDDDL

SEQ ID NO: 596 - protein, 8 aa, Human papillomavirus type 16
TLGIVCPI

SEQ ID NO: 597 - protein, 9 aa, Human papillomavirus type 16
TLGIVCPIC

SEQ ID NO: 598 - protein, 9 aa, Human T-lymphotropic virus 1
TLGQHLPTL

SEQ ID NO: 599 - protein, 9 aa, Human papillomavirus type 16
TLHEYMLDL

SEQ ID NO: 600 - protein, 9 aa, Vaccinia virus
TLKQRLTNL

SEQ ID NO: 601 - protein, 9 aa, Human rotavirus
TLLANVTAV

SEQ ID NO: 602 - protein, 9 aa, Human gammaherpesvirus 4
TLLVDLLWL

SEQ ID NO: 603 - protein, 9 aa, Trypanosoma cruzi
TLLYATVEV

SEQ ID NO: 604 - protein, 9 aa, Human adenovirus type 5
TLLYVLFEV

SEQ ID NO: 605 - protein, 9 aa, Human immunodeficiency virus
TLNAWVKVV

SEQ ID NO: 606 - protein, 9 aa, Plasmodium vivax
TLNDLETDV

SEQ ID NO: 607 - protein, 10 aa, Plasmodium falciparum
TLRKPKHKKL

SEQ ID NO: 608 - protein, 9 aa, Homo sapiens
TLWVDPYEV

SEQ ID NO: 609 - protein, 9 aa, Human betaherpesvirus 5
TMYGGISLL

SEQ ID NO: 610 - protein, 10 aa, Human betaherpesvirus 5
TPRVTGGGAM

SEQ ID NO: 611 - protein, 10 aa, Hepatitis C virus
VFFNILGGWV

SEQ ID NO: 612 - protein, 9 aa, Homo sapiens
VGYVDDTQF

SEQ ID NO: 613 - protein, 9 aa, Human polyomavirus 1
VIFDFLHCI

SEQ ID NO: 614 - protein, 9 aa, human herpesvirus 1
VIGDQYVKV

SEQ ID NO: 615 - protein, 9 aa, Human immunodeficiency virus
VIYQYMDDL

SEQ ID NO: 616 - protein, 10 aa, Hepatitis C virus
VLAALAAYCL

SEQ ID NO: 617 - protein, 9 aa, Plasmodium falciparum
VLAGLLGNV

SEQ ID NO: 618 - protein, 9 aa, Trypanosoma cruzi
VLAKDGTEV

SEQ ID NO: 619 - protein, 9 aa, Hepatitis C virus
VLCLRPVGA

SEQ ID NO: 620 - protein, 9 aa, Plasmodium falciparum
VLDKVEETV

SEQ ID NO: 621 - protein, 10 aa, Vaccinia virus
VLEDVQAAGI

SEQ ID NO: 622 - protein, 9 aa, Human betaherpesvirus 5
VLEETSVML

SEQ ID NO: 623 - protein, 10 aa, Human immunodeficiency virus
VLEWRFDSRL

SEQ ID NO: 624 - protein, 9 aa, Hepatitis B virus
VLGGCRHKL

SEQ ID NO: 625 - protein, 9 aa, human herpesvirus 1
VLGPISGHV

SEQ ID NO: 626 - protein, 9 aa, Mycobacterium tuberculosis
VLGRLDQKL

SEQ ID NO: 627 - protein, 9 aa, Hepatitis C virus
VLHKRTLGL

SEQ ID NO: 628 - protein, 10 aa, Plasmodium falciparum
VLLGGVGLVL

SEQ ID NO: 629 - protein, 9 aa, Human alphaherpesvirus 1
VLLNAPSEA

SEQ ID NO: 630 - protein, 10 aa, Human gammaherpesvirus 8
VLLNGWRWRL

SEQ ID NO: 631 - protein, 9 aa, Trypanosoma cruzi
VLLPSLFLL

SEQ ID NO: 632 - protein, 10 aa, Trypanosoma cruzi
VLLPSLFLLL

SEQ ID NO: 633 - protein, 9 aa, Influenza A virus
VLLVSLGAI

SEQ ID NO: 634 - protein, 10 aa, Mycobacterium tuberculosis
VLMGGVPGVE

SEQ ID NO: 635 - protein, 9 aa, Homo sapiens
VLMIKALEL

SEQ ID NO: 636 - protein, 9 aa, SARS coronavirus
VLNDILSRL

SEQ ID NO: 637 - protein, 9 aa, West Nile virus
VLNETTNWL

SEQ ID NO: 638 - protein, 9 aa, Dengue virus type 2
VLNPYMPSV

SEQ ID NO: 639 - protein, 9 aa, Artificial Sequence
  unknown
VLPDVFIRC

SEQ ID NO: 640 - protein, 9 aa, Vaccinia virus
VLPFDIKKL

SEQ ID NO: 641 - protein, 9 aa, Homo sapiens
VLQELNVTV

SEQ ID NO: 642 - protein, 9 aa, Human gammaherpesvirus 4
VLQWASLAV

SEQ ID NO: 643 - protein, 9 aa, Hepatitis C virus
VLSDFKTWL

SEQ ID NO: 644 - protein, 10 aa, Mycobacterium tuberculosis
VLTDGNPPEV

SEQ ID NO: 645 - protein, 9 aa, Vaccinia virus
VLYDEFVTI

SEQ ID NO: 646 - protein, 10 aa, Homo sapiens
VLYRYGSFSV

SEQ ID NO: 647 - protein, 9 aa, Human T-lymphotropic virus 1
VLYSPNVSV

SEQ ID NO: 648 - protein, 9 aa, Trypanosoma cruzi
VMACLVPAA

SEQ ID NO: 649 - protein, 9 aa, Homo sapiens
VMAPRTLIL

SEQ ID NO: 650 - protein, 9 aa, Homo sapiens
VMAPRTLVL

SEQ ID NO: 651 - protein, 9 aa, Homo sapiens
VMDSKIVQV

SEQ ID NO: 652 - protein, 10 aa, Hepatitis C virus
VMLAAQMFIV

SEQ ID NO: 653 - protein, 9 aa, Trypanosoma cruzi
VMMSCSSEA

SEQ ID NO: 654 - protein, 9 aa, Trypanosoma cruzi
VTLPTGQCL

SEQ ID NO: 655 - protein, 10 aa, Hepatitis C virus
VVFDITKWLL

SEQ ID NO: 656 - protein, 9 aa, Human polyomavirus 1
VVFEDVKGT

SEQ ID NO: 657 - protein, 9 aa, SARS coronavirus
VVFLHVTYV

SEQ ID NO: 658 - protein, 10 aa, Hepatitis C virus
VVLDSLDPMV

SEQ ID NO: 659 - protein, 10 aa, Trypanosoma cruzi
VVMACLVPAA

SEQ ID NO: 660 - protein, 9 aa, Human gammaherpesvirus 8
WATESPIYV

SEQ ID NO: 661 - protein, 9 aa, Trypanosoma cruzi
WIIKNSWTA

SEQ ID NO: 662 - protein, 9 aa, Francisella tularensis
WLGNHGFEV

SEQ ID NO: 663 - protein, 9 aa, Hepatitis C virus
WLGNIIQYA

SEQ ID NO: 664 - protein, 9 aa, Vaccinia virus
WLIGFDFDV

SEQ ID NO: 665 - protein, 9 aa, Trypanosoma cruzi
WLSDCGEAL

SEQ ID NO: 666 - protein, 9 aa, Hepatitis B virus
WLSLLVPFV

SEQ ID NO: 667 - protein, 9 aa, Hepatitis C virus
WMNRLIAFA

SEQ ID NO: 668 - protein, 10 aa, Trypanosoma cruzi
WVFPESISPV

SEQ ID NO: 669 - protein, 9 aa, Human gammaherpesvirus 8
WYELSKINP

SEQ ID NO: 670 - protein, 9 aa, Human gammaherpesvirus 8
YELSKINPT

SEQ ID NO: 671 - protein, 9 aa, Homo sapiens
YGIENEVFL

SEQ ID NO: 672 - protein, 9 aa, Vaccinia virus
YIDISDVKV

SEQ ID NO: 673 - protein, 9 aa, Homo sapiens
YIGSGDSPV

SEQ ID NO: 674 - protein, 9 aa, Homo sapiens
YIIIGDSPV

SEQ ID NO: 675 - protein, 9 aa, Homo sapiens
YIILGDSPV

SEQ ID NO: 676 - protein, 9 aa, Homo sapiens
YIISGDLPV

SEQ ID NO: 677 - protein, 9 aa, Homo sapiens
YIISGDSPL

SEQ ID NO: 678 - protein, 9 aa, Homo sapiens
YIISGDSWV

SEQ ID NO: 679 - protein, 9 aa, Homo sapiens
YIISGISPV

SEQ ID NO: 680 - protein, 10 aa, Human papillomavirus type 52
YILDLQPETT

SEQ ID NO: 681 - protein, 10 aa, Human betaherpesvirus 5
YILEETSVLL

SEQ ID NO: 682 - protein, 10 aa, Human betaherpesvirus 5
YILEETSVLM

SEQ ID NO: 683 - protein, 9 aa, Human betaherpesvirus 5
YILEETSVM

SEQ ID NO: 684 - protein, 10 aa, human herpesvirus 1
YILEETSVML

SEQ ID NO: 685 - protein, 10 aa, Human betaherpesvirus 5
YILEETSVMM

SEQ ID NO: 686 - protein, 10 aa, human herpesvirus 1
YILGADPLRV

SEQ ID NO: 687 - protein, 9 aa, Vaccinia virus
YITALNHLV

SEQ ID NO: 688 - protein, 9 aa, Hepatitis C virus
YIVRWEWVV

SEQ ID NO: 689 - protein, 9 aa, Vaccinia virus
YIYGIPLSL

SEQ ID NO: 690 - protein, 10 aa, Trypanosoma cruzi
YLAAYALVGL

SEQ ID NO: 691 - protein, 9 aa, Dermatophagoides pteronyssinus
YLAYRNQSL

SEQ ID NO: 692 - protein, 10 aa, Lymphocytic choriomeningitis virus
YLCRHCLNLL

SEQ ID NO: 693 - protein, 9 aa, Vaccinia virus
YLDGQLARL

SEQ ID NO: 694 - protein, 9 aa, Plasmodium vivax
YLDKVRATV

SEQ ID NO: 695 - protein, 10 aa, Vaccinia virus
YLDNLLPSTL

SEQ ID NO: 696 - protein, 9 aa, Homo sapiens
YLEPGPVTA

SEQ ID NO: 697 - protein, 9 aa, Homo sapiens
YLEPGPVTV

SEQ ID NO: 698 - protein, 9 aa, human herpesvirus 1
YLESFCEDV

SEQ ID NO: 699 - protein, 9 aa, Vaccinia virus
YLFLICHNL

SEQ ID NO: 700 - protein, 10 aa, Vaccinia virus
YLIDTTSREL

SEQ ID NO: 701 - protein, 9 aa, Yellow fever virus
YLIIGILTL

SEQ ID NO: 702 - protein, 9 aa, Vaccinia virus
YLIKLIEPV

SEQ ID NO: 703 - protein, 9 aa, Homo sapiens
YLISGDSPV

SEQ ID NO: 704 - protein, 9 aa, Plasmodium falciparum
YLKKIKNSL

SEQ ID NO: 705 - protein, 9 aa, Plasmodium falciparum
YLKKIQNSL

SEQ ID NO: 706 - protein, 9 aa, Mycobacterium tuberculosis
YLLDGLRAQ

SEQ ID NO: 707 - protein, 9 aa, Homo sapiens
YLLEKSRAI

SEQ ID NO: 708 - protein, 9 aa, Human herpesvirus 4
YLLEMLWRL

SEQ ID NO: 709 - protein, 9 aa, Homo sapiens
YLLKPVQRI

SEQ ID NO: 710 - protein, 9 aa, Homo sapiens
YLLPAIVHI

SEQ ID NO: 711 - protein, 10 aa, Hepatitis C virus
YLLPRRGPRL

SEQ ID NO: 712 - protein, 10 aa, Hepatitis C virus
YLLPSRGPKL

SEQ ID NO: 713 - protein, 9 aa, Plasmodium falciparum
YLNKIQNSL

SEQ ID NO: 714 - protein, 9 aa, Vaccinia virus
YLPEVISTI

SEQ ID NO: 715 - protein, 9 aa, Vaccinia virus
YLPLSVFII

SEQ ID NO: 716 - protein, 9 aa, Human gammaherpesvirus 4
YLQQNWWTL

SEQ ID NO: 717 - protein, 9 aa, Vaccinia virus
YLSAKITTL

SEQ ID NO: 718 - protein, 9 aa, Homo sapiens
YLSGANLNL

SEQ ID NO: 719 - protein, 9 aa, Hepatitis C virus
YLVAYQATV

SEQ ID NO: 720 - protein, 9 aa, Lymphocytic choriomeningitis virus
YLVSIFLHL

SEQ ID NO: 721 - protein, 9 aa, Hepatitis C virus
YLVTRHADV

SEQ ID NO: 722 - protein, 9 aa, Human lymphotropic virus type I
YLYQLSPPI

SEQ ID NO: 723 - protein, 10 aa, Vaccinia virus
YLYTEYFLFL

SEQ ID NO: 724 - protein, 9 aa, Homo sapiens
YMDGTMSQV

SEQ ID NO: 725 - protein, 9 aa, Human papillomavirus type 16
YMLDLQPET

SEQ ID NO: 726 - protein, 10 aa, Human adenovirus type 16
YMLDLQPETT

SEQ ID NO: 727 - protein, 9 aa, Homo sapiens
YMNGTMSQV

SEQ ID NO: 728 - protein, 11 aa, Human betaherpesvirus 5
YSEHPTFTSQY

SEQ ID NO: 729 - protein, 9 aa, West Nile virus
YTMDGEYRL

SEQ ID NO: 730 - protein, 9 aa, Hepatitis C virus
YTMDGEYRL

SEQ ID NO: 731 - protein, 9 aa, Human gammaherpesvirus 4
YVLDHLIVV

SEQ ID NO: 732 - protein, 10 aa, Human papillomavirus type 31
YVLDLQPEAT

SEQ ID NO: 733 - protein, 10 aa, Human betaherpesvirus 5
YVLEETSVLL

SEQ ID NO: 734 - protein, 9 aa, Human betaherpesvirus 5
YVLEETSVM

SEQ ID NO: 735 - protein, 10 aa, human herpesvirus 1
YVLEETSVML

SEQ ID NO: 736 - protein, 10 aa, Human adenovirus type 5
YVLFEVFDVV

SEQ ID NO: 737 - protein, 9 aa, Vaccinia virus
YVNAILYQI

SEQ ID NO: 738 - protein, 10 aa, Human gammaherpesvirus 4
CLGGLLTMVA

SEQ ID NO: 739 - protein, 11 aa, Human gammaherpesvirus 4
CLGGLLTMVAG

SEQ ID NO: 740 - protein, 9 aa, Human gammaherpesvirus 4
AFLGERVTL

SEQ ID NO: 741 - protein, 9 aa, Human gammaherpesvirus 4
FLGERVTLT

SEQ ID NO: 742 - protein, 9 aa, Human gammaherpesvirus 4
KLGPGEEQV

SEQ ID NO: 743 - protein, 9 aa, Human gammaherpesvirus 4
RFIAQLLLL

SEQ ID NO: 744 - protein, 9 aa, Human gammaherpesvirus 4
TLTSYWRRV

SEQ ID NO: 745 - protein, 9 aa, Homo sapiens
FAYDGKDYI

SEQ ID NO: 746 - protein, 9 aa, Homo sapiens
FAYDGKDYL

SEQ ID NO: 747 - protein, 9 aa, Homo sapiens
FVLPELPSV

SEQ ID NO: 748 - protein, 10 aa, Homo sapiens
KQLDDLKVEL

SEQ ID NO: 749 - protein, 10 aa, Artificial Sequence
  unknown
YGILGFVFTL

SEQ ID NO: 750 - protein, 10 aa, Vaccinia virus
DIRTLLPILL

SEQ ID NO: 751 - protein, 9 aa, Vaccinia virus
EINNELELV

SEQ ID NO: 752 - protein, 9 aa, Vaccinia virus
FIFLKKNEL

SEQ ID NO: 753 - protein, 9 aa, Vaccinia virus
KLIIDREVV

SEQ ID NO: 754 - protein, 9 aa, Vaccinia virus
KLTFLDVEV

SEQ ID NO: 755 - protein, 10 aa, Vaccinia virus
PITDSLSFKL

SEQ ID NO: 756 - protein, 9 aa, Human alphaherpesvirus 3
SAPLPSNRV

SEQ ID NO: 757 - protein, 9 aa, Human alphaherpesvirus 3
SLPRSRTPI

SEQ ID NO: 758 - protein, 9 aa, Vaccinia virus
YIIKKNDIV

SEQ ID NO: 759 - protein, 9 aa, Mycobacterium tuberculosis
AIYDTMQYV

SEQ ID NO: 760 - protein, 9 aa, Mycobacterium tuberculosis
GLAGGAATA

SEQ ID NO: 761 - protein, 9 aa, Mycobacterium tuberculosis
LLYDGSFAV

SEQ ID NO: 762 - protein, 9 aa, human herpesvirus 1
AMAGASTSA

SEQ ID NO: 763 - protein, 10 aa, human herpesvirus 1
FTWPPWQAGI

SEQ ID NO: 764 - protein, 10 aa, Homo sapiens
GVYDGREHTV

SEQ ID NO: 765 - protein, 10 aa, human herpesvirus 1
KISHIMLDVA

SEQ ID NO: 766 - protein, 9 aa, human herpesvirus 1
KYQEFFWDA

SEQ ID NO: 767 - protein, 10 aa, human herpesvirus 1
LLCPKSIPGL

SEQ ID NO: 768 - protein, 10 aa, human herpesvirus 1
SDNEIHNPAV

SEQ ID NO: 769 - protein, 9 aa, human herpesvirus 1
SLILVSQYT

SEQ ID NO: 770 - protein, 9 aa, Hepatitis C virus
CINGVCWSI

SEQ ID NO: 771 - protein, 9 aa, Hepatitis C virus
CINGVCWSV

SEQ ID NO: 772 - protein, 9 aa, Hepatitis C virus
CISGVCWTV

SEQ ID NO: 773 - protein, 9 aa, Homo sapiens
VMAPRTVLL

SEQ ID NO: 774 - protein, 10 aa, Homo sapiens
MLLSVPLLLG

SEQ ID NO: 775 - protein, 9 aa, Influenza A virus
FVANFSMEL

SEQ ID NO: 776 - protein, 10 aa, Hepatitis C virus
GIDPNIRTGV

SEQ ID NO: 777 - protein, 10 aa, Hepatitis C virus
GVDPNIRTGV

SEQ ID NO: 778 - protein, 8 aa, Influenza A virus
ILGFVFTL

SEQ ID NO: 779 - protein, 10 aa, Trypanosoma cruzi
FLSHNFTLVF

SEQ ID NO: 780 - protein, 10 aa, Trypanosoma cruzi
SLSHYFTLVF

SEQ ID NO: 781 - protein, 9 aa, Homo sapiens
VMAPRALLL

SEQ ID NO: 782 - protein, 9 aa, Homo sapiens
ALWMRLLPL

SEQ ID NO: 783 - protein, 9 aa, Homo sapiens
FLFAVGFYL

SEQ ID NO: 784 - protein, 9 aa, Homo sapiens
FLIVLSVAL

SEQ ID NO: 785 - protein, 9 aa, Homo sapiens
FLWSVFMLI

SEQ ID NO: 786 - protein, 10 aa, Homo sapiens
GIVEQCCTSI

SEQ ID NO: 787 - protein, 9 aa, Homo sapiens
HLVEALYLV

SEQ ID NO: 788 - protein, 9 aa, Homo sapiens
KLQVFLIVL

SEQ ID NO: 789 - protein, 9 aa, Homo sapiens
LLPPLLEHL

SEQ ID NO: 790 - protein, 9 aa, Homo sapiens
RLLCALTSL

SEQ ID NO: 791 - protein, 9 aa, Homo sapiens
SLAAGVKLL

SEQ ID NO: 792 - protein, 10 aa, Homo sapiens
SLQKRGIVEQ

SEQ ID NO: 793 - protein, 9 aa, Homo sapiens
SLQPLALEG

SEQ ID NO: 794 - protein, 9 aa, Homo sapiens
SLSPLQAEL

SEQ ID NO: 795 - protein, 9 aa, Homo sapiens
SLYQLENYC

SEQ ID NO: 796 - protein, 9 aa, Homo sapiens
VMAPRTLLL

SEQ ID NO: 797 - protein, 9 aa, Homo sapiens
ALTAVAEEV

SEQ ID NO: 798 - protein, 9 aa, Homo sapiens
FLQDVMNIL

SEQ ID NO: 799 - protein, 9 aa, Homo sapiens
LLQEYNWEL

SEQ ID NO: 800 - protein, 10 aa, Homo sapiens
RMMEYGTTMV

SEQ ID NO: 801 - protein, 10 aa, Homo sapiens
SLYHVYEVNL

SEQ ID NO: 802 - protein, 9 aa, Homo sapiens
TIADFWQMV

SEQ ID NO: 803 - protein, 10 aa, Homo sapiens
VCGERGFFYT

SEQ ID NO: 804 - protein, 9 aa, Homo sapiens
VIVMLTPLV

SEQ ID NO: 805 - protein, 10 aa, Homo sapiens
VMNILLQYVV

SEQ ID NO: 806 - protein, 10 aa, Homo sapiens
ALWGPDPAAA

SEQ ID NO: 807 - protein, 9 aa, Homo sapiens
LNIDLLWSV

SEQ ID NO: 808 - protein, 9 aa, Homo sapiens
RLLPLLALL

SEQ ID NO: 809 - protein, 9 aa, Homo sapiens
VLFGLGFAI

SEQ ID NO: 810 - protein, 8 aa, Homo sapiens
WGPDPAAA

SEQ ID NO: 811 - protein, 10 aa, Homo sapiens
SHLVEALYLV

SEQ ID NO: 812 - protein, 9 aa, Homo sapiens
VMNILLQYV

SEQ ID NO: 813 - protein, 9 aa, Homo sapiens
FQDENYLYL

SEQ ID NO: 814 - protein, 9 aa, Homo sapiens
ELAEYLYNI

SEQ ID NO: 815 - protein, 9 aa, Homo sapiens
ILMHCQTTL

SEQ ID NO: 816 - protein, 9 aa, Homo sapiens
FLWSVFWLI

SEQ ID NO: 817 - protein, 9 aa, Human gammaherpesvirus 4
ILLARLFLY

SEQ ID NO: 818 - protein, 9 aa, Human gammaherpesvirus 4
LIVDAVLQL

SEQ ID NO: 819 - protein, 9 aa, Human gammaherpesvirus 4
TVCGGIMFL

SEQ ID NO: 820 - protein, 10 aa, Homo sapiens
ALWMRLLPLL

SEQ ID NO: 821 - protein, 10 aa, Homo sapiens
LCGSHLVEAL

SEQ ID NO: 822 - protein, 9 aa, Homo sapiens
LLDVAPLSL

SEQ ID NO: 823 - protein, 9 aa, Homo sapiens
LLLLDVAPL

SEQ ID NO: 824 - protein, 9 aa, Homo sapiens
LMGDKSENV

SEQ ID NO: 825 - protein, 9 aa, Human gammaherpesvirus 4
CLGGLLTMN

SEQ ID NO: 826 - protein, 10 aa, Human gammaherpesvirus 4
LLDFVRFMGY

SEQ ID NO: 827 - protein, 9 aa, Human gammaherpesvirus 4
QLLQHYREV

SEQ ID NO: 828 - protein, 9 aa, Human gammaherpesvirus 4
VMATLLPPV

SEQ ID NO: 829 - protein, 9 aa, Human papillomavirus type 16
ALQAIELQL

SEQ ID NO: 830 - protein, 9 aa, Mycobacterium tuberculosis
FLLGLLFFV

SEQ ID NO: 831 - protein, 9 aa, Mycobacterium tuberculosis
FLYELIWNV

SEQ ID NO: 832 - protein, 9 aa, Human papillomavirus type 16
TLQDVSLEV

SEQ ID NO: 833 - protein, 9 aa, Yellow fever virus
VLAGWLFHV

SEQ ID NO: 834 - protein, 10 aa, Human papillomavirus type 16
YICEEASVTV

SEQ ID NO: 835 - protein, 9 aa, Human papillomavirus type 11
DLLLGTLNI

SEQ ID NO: 836 - protein, 9 aa, Human papillomavirus type 18
FQQLFLNTL

SEQ ID NO: 837 - protein, 9 aa, Human papillomavirus type 6
LLLGTLNIV

SEQ ID NO: 838 - protein, 9 aa, Human rotavirus
LLNYILKSV

SEQ ID NO: 839 - protein, 9 aa, Human papillomavirus type 11
LQPPDPVGL

SEQ ID NO: 840 - protein, 9 aa, Human papillomavirus type 11
PLTQHYQIL

SEQ ID NO: 841 - protein, 9 aa, Human papillomavirus type 11
TLKDIVLDL

SEQ ID NO: 842 - protein, 10 aa, Human papillomavirus type 16
TLLQQYCLYL

SEQ ID NO: 843 - protein, 9 aa, Human papillomavirus type 18
TLQDIVLHL

SEQ ID NO: 844 - protein, 9 aa, Human papillomavirus type 16
FLLCFCVLL

SEQ ID NO: 845 - protein, 9 aa, Human papillomavirus type 16
ICWGNQLFV

SEQ ID NO: 846 - protein, 9 aa, Human papillomavirus type 16
VLLCVCLLI

SEQ ID NO: 847 - protein, 9 aa, Human papillomavirus type 16
VLLLWITAA

SEQ ID NO: 848 - protein, 9 aa, Human papillomavirus type 16
YIIFVYIPL

SEQ ID NO: 849 - protein, 9 aa, Hepatitis B virus
KLVCSPAPC

SEQ ID NO: 850 - protein, 9 aa, Human papillomavirus type 18
ELTEVFEFA

SEQ ID NO: 851 - protein, 9 aa, Human papillomavirus type 18
FAFKDLFVV

SEQ ID NO: 852 - protein, 9 aa, Human papillomavirus type 18
KCIDFYSRI

SEQ ID NO: 853 - protein, 9 aa, Human papillomavirus type 16
KISEYRHYC

SEQ ID NO: 854 - protein, 10 aa, Human papillomavirus type 18
KLTNTGLYNL

SEQ ID NO: 855 - protein, 9 aa, Human papillomavirus type 18
KTVLELTEV

SEQ ID NO: 856 - protein, 9 aa, Human papillomavirus type 18
LFLNTLSFV

SEQ ID NO: 857 - protein, 9 aa, Human papillomavirus type 18
LQDIEITCV

SEQ ID NO: 858 - protein, 10 aa, Human papillomavirus type 18
SLQDIEITCV

SEQ ID NO: 859 - protein, 11 aa, Vaccinia virus
IPDEQKTIIGL

SEQ ID NO: 860 - protein, 10 aa, Vaccinia virus
KITSYKFESV

SEQ ID NO: 861 - protein, 9 aa, Vaccinia virus
KLFSDISAI

SEQ ID NO: 862 - protein, 9 aa, Vaccinia virus
KLIIHNPEL

SEQ ID NO: 863 - protein, 9 aa, Vaccinia virus
SLKDVLVSV

SEQ ID NO: 864 - protein, 9 aa, Vaccinia virus
TLLDHIRTA

SEQ ID NO: 865 - protein, 9 aa, Toxoplasma gondii
LLFSFAQAV

SEQ ID NO: 866 - protein, 9 aa, Human gammaherpesvirus 4
TLDTKPLSV

SEQ ID NO: 867 - protein, 9 aa, Homo sapiens
NLAQDLATV

SEQ ID NO: 868 - protein, 9 aa, Homo sapiens
QLARQQVHV

SEQ ID NO: 869 - protein, 9 aa, Homo sapiens
SLEEEIRFL

SEQ ID NO: 870 - protein, 9 aa, Homo sapiens
ALLDQLHTL

SEQ ID NO: 871 - protein, 9 aa, Homo sapiens
ALNNLLHSL

SEQ ID NO: 872 - protein, 9 aa, Homo sapiens
KQLEVVHTL

SEQ ID NO: 873 - protein, 9 aa, Homo sapiens
GLMTTVHAI

SEQ ID NO: 874 - protein, 9 aa, Homo sapiens
IVIGVLHQL

SEQ ID NO: 875 - protein, 9 aa, Homo sapiens
QLNEQVHSL

SEQ ID NO: 876 - protein, 9 aa, Homo sapiens
QQLQIIHRV

SEQ ID NO: 877 - protein, 9 aa, Homo sapiens
RQIFNGTFV

SEQ ID NO: 878 - protein, 9 aa, Homo sapiens
SALGYLHSI

SEQ ID NO: 879 - protein, 9 aa, Homo sapiens
SMMDVDHQI

SEQ ID NO: 880 - protein, 9 aa, Homo sapiens
SMTLAIHEI

SEQ ID NO: 881 - protein, 9 aa, Homo sapiens
TLTNVIHNL

SEQ ID NO: 882 - protein, 9 aa, Homo sapiens
KLIETYFSK

SEQ ID NO: 883 - protein, 9 aa, Vaccinia virus
KISNTTFEV

SEQ ID NO: 884 - protein, 9 aa, Vaccinia virus
KLSDSKITV

SEQ ID NO: 885 - protein, 9 aa, Vaccinia virus
KLVGKTVKV

SEQ ID NO: 886 - protein, 10 aa, Vaccinia virus
SLLFIPDIKL

SEQ ID NO: 887 - protein, 9 aa, Vaccinia virus
VLSLELPEV

SEQ ID NO: 888 - protein, 10 aa, Homo sapiens
EVGGEALGRL

SEQ ID NO: 889 - protein, 9 aa, Homo sapiens
FVNDIFERI

SEQ ID NO: 890 - protein, 11 aa, Homo sapiens
PKFEVIEKPQA

SEQ ID NO: 891 - protein, 10 aa, Homo sapiens
RLYPWGVVEV

SEQ ID NO: 892 - protein, 11 aa, Homo sapiens
TIIDLPGITRV

SEQ ID NO: 893 - protein, 10 aa, Homo sapiens
TIQKSSLDQL

SEQ ID NO: 894 - protein, 11 aa, Homo sapiens
VVIRGNSIIML

SEQ ID NO: 895 - protein, 9 aa, Yellow fever virus
LLWNGPMAV

SEQ ID NO: 896 - protein, 9 aa, Pseudomonas aeruginosa
ALAEGDLLA

SEQ ID NO: 897 - protein, 10 aa, Homo sapiens
GLEALVPLAV

SEQ ID NO: 898 - protein, 10 aa, Homo sapiens
GLLDKAVSNV

SEQ ID NO: 899 - protein, 9 aa, Homo sapiens
GMVTTSTTL

SEQ ID NO: 900 - protein, 10 aa, Homo sapiens
KAFLTQLDEL

SEQ ID NO: 901 - protein, 9 aa, Homo sapiens
KLSEGDLLA

SEQ ID NO: 902 - protein, 10 aa, Homo sapiens
LLDKAVSNVI

SEQ ID NO: 903 - protein, 10 aa, Homo sapiens
RLLDLAQEGL

SEQ ID NO: 904 - protein, 10 aa, Homo sapiens
TTLITNLSSV

SEQ ID NO: 905 - protein, 9 aa, Homo sapiens
VLNEQVKEA

SEQ ID NO: 906 - protein, 8 aa, SARS coronavirus
ILLNKHID

SEQ ID NO: 907 - protein, 9 aa, Vaccinia virus
AINVEKIEL

SEQ ID NO: 908 - protein, 9 aa, Vaccinia virus
DLKPDNILL

SEQ ID NO: 909 - protein, 10 aa, Vaccinia virus
EIVNLLDNKV

SEQ ID NO: 910 - protein, 10 aa, Vaccinia virus
ELNAELSDKL

SEQ ID NO: 911 - protein, 9 aa, Mycobacterium tuberculosis
FMYEGDTPL

SEQ ID NO: 912 - protein, 10 aa, Vaccinia virus
ILFPDDVQEL

SEQ ID NO: 913 - protein, 9 aa, Vaccinia virus
ILNDEQLNL

SEQ ID NO: 914 - protein, 10 aa, Vaccinia virus
KIDTTHVSKV

SEQ ID NO: 915 - protein, 9 aa, Vaccinia virus
KIEIERKKL

SEQ ID NO: 916 - protein, 9 aa, Vaccinia virus
KLGFEEIKG

SEQ ID NO: 917 - protein, 9 aa, Vaccinia virus
KLGIGNSPV

SEQ ID NO: 918 - protein, 11 aa, Human immunodeficiency virus
KSLFNTIATLY

SEQ ID NO: 919 - protein, 10 aa, Human immunodeficiency virus
KSLFNTIAVL

SEQ ID NO: 920 - protein, 11 aa, Human immunodeficiency virus
KSLFNTIAVLY

SEQ ID NO: 921 - protein, 10 aa, Human immunodeficiency virus
KSLFNTVATL

SEQ ID NO: 922 - protein, 11 aa, Human immunodeficiency virus
KSLFNTVATLY

SEQ ID NO: 923 - protein, 10 aa, Human immunodeficiency virus
KSLFNTVAVL

SEQ ID NO: 924 - protein, 11 aa, Human immunodeficiency virus
KSLFNTVAVLY

SEQ ID NO: 925 - protein, 11 aa, Human immunodeficiency virus
KSLYNTIATLY

SEQ ID NO: 926 - protein, 11 aa, Human immunodeficiency virus
KSLYNTIAVLY

SEQ ID NO: 927 - protein, 10 aa, Human immunodeficiency virus
KSLYNTVATL

SEQ ID NO: 928 - protein, 11 aa, Human immunodeficiency virus
KSLYNTVATLY

SEQ ID NO: 929 - protein, 11 aa, Human immunodeficiency virus
KSLYNTVAVLY

SEQ ID NO: 930 - protein, 9 aa, Vaccinia virus
LIDNPDNNL

SEQ ID NO: 931 - protein, 9 aa, Vaccinia virus
LLFLKDVEP

SEQ ID NO: 932 - protein, 8 aa, Vaccinia virus
LLVNEFYI

SEQ ID NO: 933 - protein, 9 aa, Vaccinia virus WR
LVEKVLKIL

SEQ ID NO: 934 - protein, 10 aa, Vaccinia virus WR
LVSIPRTNIV

SEQ ID NO: 935 - protein, 9 aa, Vaccinia virus WR
MPQMKKILK

SEQ ID NO: 936 - protein, 9 aa, Vaccinia virus WR
QVKDEKLNL

SEQ ID NO: 937 - protein, 11 aa, Human immunodeficiency virus 1
RSLFNTIATLY

SEQ ID NO: 938 - protein, 11 aa, Human immunodeficiency virus 1
RSLFNTIAVLY

SEQ ID NO: 939 - protein, 10 aa, Human immunodeficiency virus 1
RSLFNTVATL

SEQ ID NO: 940 - protein, 11 aa, Human immunodeficiency virus 1
RSLFNTVATLY

SEQ ID NO: 941 - protein, 11 aa, Human immunodeficiency virus 1
RSLFNTVAVLY

SEQ ID NO: 942 - protein, 11 aa, Human immunodeficiency virus 1
RSLYNTIATLY

SEQ ID NO: 943 - protein, 11 aa, Human immunodeficiency virus 1
RSLYNTIAVLY

SEQ ID NO: 944 - protein, 10 aa, Human immunodeficiency virus 1
RSLYNTVATL

SEQ ID NO: 945 - protein, 11 aa, Human immunodeficiency virus 1
RSLYNTVATLY

SEQ ID NO: 946 - protein, 10 aa, Human immunodeficiency virus 1
RSLYNTVAVL

SEQ ID NO: 947 - protein, 11 aa, Human immunodeficiency virus 1
RSLYNTVAVLY

SEQ ID NO: 948 - protein, 10 aa, Human immunodeficiency virus 1
SLFNTIAVLY

SEQ ID NO: 949 - protein, 10 aa, Human immunodeficiency virus 1
SLFNTVATLY

SEQ ID NO: 950 - protein, 10 aa, Vaccinia virus WR
SLYNLVKSSV

SEQ ID NO: 951 - protein, 9 aa, Homo sapiens
ALDKATVLL

SEQ ID NO: 952 - protein, 9 aa, Homo sapiens
ALKDKIEKA

SEQ ID NO: 953 - protein, 9 aa, Homo sapiens
ALNDHFVKL

SEQ ID NO: 954 - protein, 9 aa, Homo sapiens
ALNEKLVNL

SEQ ID NO: 955 - protein, 9 aa, Homo sapiens
AVSDGVIKV

SEQ ID NO: 956 - protein, 9 aa, Homo sapiens
FAGDDAPRA

SEQ ID NO: 957 - protein, 10 aa, Homo sapiens
FIQTQQLHAA

SEQ ID NO: 958 - protein, 10 aa, Homo sapiens
FLAEEGFYKF

SEQ ID NO: 959 - protein, 10 aa, Homo sapiens
FLDLEPIPGA

SEQ ID NO: 960 - protein, 8 aa, Homo sapiens
FLLSLLIL

SEQ ID NO: 961 - protein, 9 aa, Homo sapiens
FLPSYIIDV

SEQ ID NO: 962 - protein, 8 aa, Homo sapiens
FVFPGELL

SEQ ID NO: 963 - protein, 10 aa, Homo sapiens
GIVEGLMTTV

SEQ ID NO: 964 - protein, 9 aa, Homo sapiens
GIWGFIKGV

SEQ ID NO: 965 - protein, 9 aa, Homo sapiens
GLDIPTVQV

SEQ ID NO: 966 - protein, 8 aa, Homo sapiens
GLFDTAIS

SEQ ID NO: 967 - protein, 9 aa, Homo sapiens
GLIDGRLTI

SEQ ID NO: 968 - protein, 11 aa, Homo sapiens
GLIKGSGTAEV

SEQ ID NO: 969 - protein, 10 aa, Homo sapiens
GLQDFDLLRV

SEQ ID NO: 970 - protein, 9 aa, Homo sapiens
GQIGQLPQA

SEQ ID NO: 971 - protein, 9 aa, Homo sapiens
GVLPNIQAV

SEQ ID NO: 972 - protein, 10 aa, Homo sapiens
IIMLEALERV

SEQ ID NO: 973 - protein, 9 aa, Homo sapiens
IINEPTAAA

SEQ ID NO: 974 - protein, 9 aa, Homo sapiens
IIPASTGAA

SEQ ID NO: 975 - protein, 12 aa, Homo sapiens
ILAADFEIGHFL

SEQ ID NO: 976 - protein, 9 aa, Homo sapiens
ILGYTEHQV

SEQ ID NO: 977 - protein, 9 aa, Homo sapiens
ILSGVVTKM

SEQ ID NO: 978 - protein, 9 aa, Homo sapiens
KLDQDLNEV

SEQ ID NO: 979 - protein, 11 aa, Homo sapiens
KLIGDPNLEFV

SEQ ID NO: 980 - protein, 11 aa, Homo sapiens
KLMELHGEGSS

SEQ ID NO: 981 - protein, 10 aa, Homo sapiens
KVFDPVPVGV

SEQ ID NO: 982 - protein, 8 aa, Homo sapiens
LLDVPTAA

SEQ ID NO: 983 - protein, 9 aa, Homo sapiens
LLDVTPLSL

SEQ ID NO: 984 - protein, 8 aa, Homo sapiens
LLDVVHPA

SEQ ID NO: 985 - protein, 9 aa, Homo sapiens
LLDVVHPAA

SEQ ID NO: 986 - protein, 9 aa, Homo sapiens
LLGPRLVLA

SEQ ID NO: 987 - protein, 9 aa, Homo sapiens
NLAEKPKTV

SEQ ID NO: 988 - protein, 9 aa, Homo sapiens
NLDPAVHEV

SEQ ID NO: 989 - protein, 9 aa, Homo sapiens
NMVAKVDEV

SEQ ID NO: 990 - protein, 9 aa, Homo sapiens
RVPPPPPIA

SEQ ID NO: 991 - protein, 9 aa, Homo sapiens
SLFEGTWYL

SEQ ID NO: 992 - protein, 9 aa, Homo sapiens
SLLDIIEKV

SEQ ID NO: 993 - protein, 9 aa, Homo sapiens
SLLEKSLGL

SEQ ID NO: 994 - protein, 9 aa, Homo sapiens
SMPDFDLHL

SEQ ID NO: 995 - protein, 9 aa, Homo sapiens
SQVPEVTTV

SEQ ID NO: 996 - protein, 12 aa, Homo sapiens
SVIDYELIDQDA

SEQ ID NO: 997 - protein, 11 aa, Homo sapiens
TLAEVERLKGL

SEQ ID NO: 998 - protein, 9 aa, Homo sapiens
TLAEVSTRL

SEQ ID NO: 999 - protein, 9 aa, Homo sapiens
TLAKYLMEL

SEQ ID NO: 1000 - protein, 11 aa, Homo sapiens
TLQEVFEKATF

SEQ ID NO: 1001 - protein, 10 aa, Homo sapiens
TLWDIQKDLK

SEQ ID NO: 1002 - protein, 9 aa, Homo sapiens
TLWGIQKEL

SEQ ID NO: 1003 - protein, 9 aa, Homo sapiens
TLYEHNNEL

SEQ ID NO: 1004 - protein, 11 aa, Homo sapiens
VLPTETEVAPA

SEQ ID NO: 1005 - protein, 9 aa, Homo sapiens
VVQDGIVKA

SEQ ID NO: 1006 - protein, 10 aa, Homo sapiens
YAYDGKDYIA

SEQ ID NO: 1007 - protein, 8 aa, Homo sapiens
YLFLGGIL

SEQ ID NO: 1008 - protein, 11 aa, Homo sapiens
LMTTVHAITAT

SEQ ID NO: 1009 - protein, 8 aa, Homo sapiens
SLFEGTWY

SEQ ID NO: 1010 - protein, 9 aa, Homo sapiens
AIIGGTFTV

SEQ ID NO: 1011 - protein, 10 aa, Homo sapiens
YVPEDEDLKK

SEQ ID NO: 1012 - protein, 13 aa, Human T-lymphotropic virus 1
LLFGKPVYVSCMK

SEQ ID NO: 1013 - protein, 10 aa, Homo sapiens
FLLKAEVQKL

SEQ ID NO: 1014 - protein, 9 aa, HIV-1 M:A
SLFNTVATL

SEQ ID NO: 1015 - protein, 9 aa, Homo sapiens
SLVEELKKV

SEQ ID NO: 1016 - protein, 9 aa, Homo sapiens
VLAEELHKV

SEQ ID NO: 1017 - protein, 9 aa, Homo sapiens
SLMSWSAIL

SEQ ID NO: 1018 - protein, 10 aa, Homo sapiens
FLMLVGGSTL

SEQ ID NO: 1019 - protein, 10 aa, Homo sapiens
MLVGGSTLCV

SEQ ID NO: 1020 - protein, 10 aa, Homo sapiens
QLGPTCLSSL

SEQ ID NO: 1021 - protein, 10 aa, Homo sapiens
SLLGQLSGQV

SEQ ID NO: 1022 - protein, 10 aa, Homo sapiens
TLLLEGVMAA

SEQ ID NO: 1023 - protein, 10 aa, Homo sapiens
YLAPENGYLM

SEQ ID NO: 1024 - protein, 9 aa, Homo sapiens
ALLNIKVKL

SEQ ID NO: 1025 - protein, 9 aa, Human betaherpesvirus 5
NLVGMVATV

SEQ ID NO: 1026 - protein, 9 aa, Human betaherpesvirus 5
NLVPMVASV

SEQ ID NO: 1027 - protein, 9 aa, Homo sapiens
RLASYLDKV

SEQ ID NO: 1028 - protein, 9 aa, Dengue virus 1
AIVREAIKR

SEQ ID NO: 1029 - protein, 9 aa, Leptospira interrogans serovar Pomona
KLIVTPAAL

SEQ ID NO: 1030 - protein, 9 aa, Homo sapiens
MLLSVPLLL

SEQ ID NO: 1031 - protein, 9 aa, Dengue virus 1
SRNSTHEMY

SEQ ID NO: 1032 - protein, 9 aa, Dengue virus 1
TLYAVATTI

SEQ ID NO: 1033 - protein, 10 aa, Influenza A virus (A/Bar-headed Goose/Qinghai/61/05(H5N1))
RLYQNPTTYI

SEQ ID NO: 1034 - protein, 9 aa, Human betaherpesvirus 5
NLVAMVATV

SEQ ID NO: 1035 - protein, 9 aa, Human betaherpesvirus 5
NLVPQVATV

SEQ ID NO: 1036 - protein, 9 aa, Human betaherpesvirus 5
NLVPTVATV

SEQ ID NO: 1037 - protein, 9 aa, Human betaherpesvirus 5
NLVPVVATV

SEQ ID NO: 1038 - protein, 9 aa, Mycobacterium tuberculosis H37Rv
AVADHVAAV

SEQ ID NO: 1039 - protein, 11 aa, Hepatitis C virus
FLLALLSCLTV

SEQ ID NO: 1040 - protein, 9 aa, Homo sapiens
VLHDDLLEA

SEQ ID NO: 1041 - protein, 9 aa, Homo sapiens
FIDSYICQV

SEQ ID NO: 1042 - protein, 9 aa, Homo sapiens
GVLVGVALI

SEQ ID NO: 1043 - protein, 9 aa, Homo sapiens
YLDPAQQNL

SEQ ID NO: 1044 - protein, 9 aa, Human herpesvirus 5 strain AD169
RQYDPVAAL

SEQ ID NO: 1045 - protein, 9 aa, Human herpesvirus 5 strain AD169
VAALFFFDI

SEQ ID NO: 1046 - protein, 10 aa, Homo sapiens
ELAGWGILTV

SEQ ID NO: 1047 - protein, 10 aa, Homo sapiens
LLAGIGTVPI

SEQ ID NO: 1048 - protein, 9 aa, Homo sapiens
FLWGPRAYA

SEQ ID NO: 1049 - protein, 9 aa, Homo sapiens
RLQGISPKI

SEQ ID NO: 1050 - protein, 9 aa, Homo sapiens
FLLPILSQI

SEQ ID NO: 1051 - protein, 9 aa, Vaccinia virus Copenhagen
RIIYIIRFL

SEQ ID NO: 1052 - protein, 10 aa, Homo sapiens
SLMASSPTSI

SEQ ID NO: 1053 - protein, 9 aa, Homo sapiens
YIGEVLVSV

SEQ ID NO: 1054 - protein, 9 aa, Homo sapiens
YSLEYFQFV

SEQ ID NO: 1055 - protein, 11 aa, Homo sapiens
CIPPDSLLFPA

SEQ ID NO: 1056 - protein, 9 aa, Homo sapiens
FLVQNIHTL

SEQ ID NO: 1057 - protein, 9 aa, Homo sapiens
KLHDVEHVL

SEQ ID NO: 1058 - protein, 10 aa, Human papillomavirus type 16
RTLEDLLMGT

SEQ ID NO: 1059 - protein, 9 aa, Homo sapiens
YAIKNIHGV

SEQ ID NO: 1060 - protein, 9 aa, Toxoplasma gondii
FAAAFFPAV

SEQ ID NO: 1061 - protein, 9 aa, Toxoplasma gondii
FLLGLLVHV

SEQ ID NO: 1062 - protein, 9 aa, Toxoplasma gondii
FLSLSLLVI

SEQ ID NO: 1063 - protein, 9 aa, Toxoplasma gondii
FLTDYIPGA

SEQ ID NO: 1064 - protein, 9 aa, Toxoplasma gondii
FLVPFVVFL

SEQ ID NO: 1065 - protein, 9 aa, Toxoplasma gondi ME49
FMGVLVNSL

SEQ ID NO: 1066 - protein, 10 aa, Toxoplasma gondii
FMIAFISCFA

SEQ ID NO: 1067 - protein, 9 aa, Toxoplasma gondii
FMIVSISLV

SEQ ID NO: 1068 - protein, 9 aa, Toxoplasma gondii
FVIFACNFV

SEQ ID NO: 1069 - protein, 9 aa, Toxoplasma gondii
GLAAAVVAV

SEQ ID NO: 1070 - protein, 9 aa, Toxoplasma gondii
ITMGSLFFV

SEQ ID NO: 1071 - protein, 9 aa, Toxoplasma gondii
VLLPVLFGV

SEQ ID NO: 1072 - protein, 9 aa, Toxoplasma gondii ME49
VVFVVFMGV

SEQ ID NO: 1073 - protein, 9 aa, Homo sapiens
MVWESGCTV

SEQ ID NO: 1074 - protein, 9 aa, Mycobacterium tuberculosis H37Rv
ALDEGLLPV

SEQ ID NO: 1075 - protein, 9 aa, Mycobacterium tuberculosis H37Rv
ALLGGLRPV

SEQ ID NO: 1076 - protein, 9 aa, Mycobacterium tuberculosis H37Rv
AMAGSIDLL

SEQ ID NO: 1077 - protein, 9 aa, Mycobacterium tuberculosis H37Rv
GMFANRWII

SEQ ID NO: 1078 - protein, 9 aa, Mycobacterium tuberculosis H37Rv
HLDDVGFLV

SEQ ID NO: 1079 - protein, 9 aa, Mycobacterium tuberculosis H37Rv
SLIDLLHKI

SEQ ID NO: 1080 - protein, 9 aa, Mycobacterium tuberculosis H37Rv
SLRNWIATL

SEQ ID NO: 1081 - protein, 9 aa, Mycobacterium tuberculosis H37Rv
SLWKDGAPL

SEQ ID NO: 1082 - protein, 9 aa, Mycobacterium tuberculosis H37Rv
WLYPGAQNL

SEQ ID NO: 1083 - protein, 9 aa, Mycobacterium tuberculosis H37Rv
YLLADTFTV

SEQ ID NO: 1084 - protein, 9 aa, Mycobacterium tuberculosis
AMLGHAGDM

SEQ ID NO: 1085 - protein, 9 aa, Mycobacterium tuberculosis
MLGHAGDMA

SEQ ID NO: 1086 - protein, 9 aa, Mycobacterium tuberculosis H37Rv
MMARDTAEA

SEQ ID NO: 1087 - protein, 9 aa, Mycobacterium tuberculosis H37Rv
QAMEDLVRA

SEQ ID NO: 1088 - protein, 9 aa, Homo sapiens
QLVQSGAEV

SEQ ID NO: 1089 - protein, 9 aa, Homo sapiens
SLFLGILSV

SEQ ID NO: 1090 - protein, 9 aa, Mycobacterium tuberculosis H37Rv
SQIMYNYPA

SEQ ID NO: 1091 - protein, 9 aa, Homo sapiens
YLGEVIVSV

SEQ ID NO: 1092 - protein, 9 aa, Homo sapiens
YLGEVLVSV

SEQ ID NO: 1093 - protein, 10 aa, Homo sapiens
ALIDCNPCTL

SEQ ID NO: 1094 - protein, 10 aa, Homo sapiens
ALLMPAGVPL

SEQ ID NO: 1095 - protein, 10 aa, Homo sapiens
ALLPTALDAL

SEQ ID NO: 1096 - protein, 10 aa, Homo sapiens
CLLSGTYIFA

SEQ ID NO: 1097 - protein, 10 aa, Homo sapiens
FIFPASKVYL

SEQ ID NO: 1098 - protein, 9 aa, Homo sapiens
FLLDILGAT

SEQ ID NO: 1099 - protein, 9 aa, Homo sapiens
FLLENAAYL

SEQ ID NO: 1100 - protein, 10 aa, Homo sapiens
FLLENAAYLD

SEQ ID NO: 1101 - protein, 10 aa, Homo sapiens
FMHNRLQYSL

SEQ ID NO: 1102 - protein, 10 aa, Homo sapiens
FTHNEYKFYV

SEQ ID NO: 1103 - protein, 10 aa, Homo sapiens
HLLTSPKPSL

SEQ ID NO: 1104 - protein, 9 aa, Homo sapiens
KAFQDVLYV

SEQ ID NO: 1105 - protein, 10 aa, Homo sapiens
KLLSSGAFSA

SEQ ID NO: 1106 - protein, 10 aa, Homo sapiens
KLMPPDRTAV

SEQ ID NO: 1107 - protein, 9 aa, Homo sapiens
KLTQINFNM

SEQ ID NO: 1108 - protein, 9 aa, Homo sapiens
KMAAFPETL

SEQ ID NO: 1109 - protein, 9 aa, Homo sapiens
LLIADNPQL

SEQ ID NO: 1110 - protein, 9 aa, Homo sapiens
LLIKKLPRV

SEQ ID NO: 1111 - protein, 9 aa, Homo sapiens
LLMPAGVPL

SEQ ID NO: 1112 - protein, 10 aa, Homo sapiens
LLMPAGVPLT

SEQ ID NO: 1113 - protein, 9 aa, Homo sapiens
LLSSGAFSA

SEQ ID NO: 1114 - protein, 10 aa, Homo sapiens
LLVALAIGCV

SEQ ID NO: 1115 - protein, 9 aa, Homo sapiens
LLVSEIDWL

SEQ ID NO: 1116 - protein, 9 aa, Homo sapiens
LMASSPTSI

SEQ ID NO: 1117 - protein, 9 aa, Homo sapiens
NLATYMNSI

SEQ ID NO: 1118 - protein, 10 aa, Homo sapiens
NVMPVLDQSV

SEQ ID NO: 1119 - protein, 9 aa, Homo sapiens
QLLKLNVPA

SEQ ID NO: 1120 - protein, 10 aa, Homo sapiens
RLLIKKLPRV

SEQ ID NO: 1121 - protein, 9 aa, Homo sapiens
TLKKYFIPV

SEQ ID NO: 1122 - protein, 10 aa, Homo sapiens
YIFAVLLVCV

SEQ ID NO: 1123 - protein, 9 aa, Homo sapiens
YLDLLFQIL

SEQ ID NO: 1124 - protein, 10 aa, Homo sapiens
YLDLLFQILL

SEQ ID NO: 1125 - protein, 9 aa, Homo sapiens
YLLPEAEEI

SEQ ID NO: 1126 - protein, 9 aa, Homo sapiens
YLQQNTHTL

SEQ ID NO: 1127 - protein, 10 aa, Homo sapiens
YMIPSIRNSI

SEQ ID NO: 1128 - protein, 9 aa, Homo sapiens
YMNSIRLYA

SEQ ID NO: 1129 - protein, 9 aa, Human alphaherpesvirus 1
ALLDRDCRV

SEQ ID NO: 1130 - protein, 8 aa, Human gammaherpesvirus 4
CLGLLTMV

SEQ ID NO: 1131 - protein, 9 aa, Human alphaherpesvirus 1
FLADAVVRL

SEQ ID NO: 1132 - protein, 9 aa, Human alphaherpesvirus 1
FLIAYQPLL

SEQ ID NO: 1133 - protein, 9 aa, Human alphaherpesvirus 1
FLWEDQTLL

SEQ ID NO: 1134 - protein, 9 aa, Human alphaherpesvirus 1
ILIEGIFFA

SEQ ID NO: 1135 - protein, 9 aa, Human gammaherpesvirus 4
LLDFVRMGV

SEQ ID NO: 1136 - protein, 9 aa, Homo sapiens
PTLDKVLEL

SEQ ID NO: 1137 - protein, 9 aa, Homo sapiens
PTLDKVLEV

SEQ ID NO: 1138 - protein, 9 aa, Human alphaherpesvirus 1
RILGVLVHL

SEQ ID NO: 1139 - protein, 9 aa, Human alphaherpesvirus 1
RLLGFADTV

SEQ ID NO: 1140 - protein, 9 aa, Herpes simplex virus (type 1 / strain 17)
RLNELLAYV

SEQ ID NO: 1141 - protein, 9 aa, Homo sapiens
RTLDKVLEV

SEQ ID NO: 1142 - protein, 9 aa, Human alphaherpesvirus 1
SVYPYDEFV

SEQ ID NO: 1143 - protein, 9 aa, Human alphaherpesvirus 1
TLLELVVSV

SEQ ID NO: 1144 - protein, 9 aa, Homo sapiens
TAMDVVYAL

SEQ ID NO: 1145 - protein, 9 aa, Human gammaherpesvirus 8
ALISAFSGS

SEQ ID NO: 1146 - protein, 9 aa, Human gammaherpesvirus 8
AMLVLLAEI

SEQ ID NO: 1147 - protein, 9 aa, Human gammaherpesvirus 8
DGGDGNKTL

SEQ ID NO: 1148 - protein, 9 aa, Human gammaherpesvirus 8
GRRDPKCQW

SEQ ID NO: 1149 - protein, 9 aa, Human gammaherpesvirus 8
LVLILYLCV

SEQ ID NO: 1150 - protein, 10 aa, Human gammaherpesvirus 8
MLMIIIVIAI

SEQ ID NO: 1151 - protein, 9 aa, Human gammaherpesvirus 8
PESSQRPPL

SEQ ID NO: 1152 - protein, 9 aa, Human gammaherpesvirus 8
PLPLTQPGE

SEQ ID NO: 1153 - protein, 9 aa, Human gammaherpesvirus 8
PVVSTHEQI

SEQ ID NO: 1154 - protein, 10 aa, Human gammaherpesvirus 8
QQDEQQQQDE

SEQ ID NO: 1155 - protein, 9 aa, Human gammaherpesvirus 8
RLAAGSPSS

SEQ ID NO: 1156 - protein, 10 aa, Human gammaherpesvirus 8
SSMKVNVNGV

SEQ ID NO: 1157 - protein, 9 aa, Homo sapiens
TIMPKDIQL

SEQ ID NO: 1158 - protein, 10 aa, Human gammaherpesvirus 8
WRLGAIPPLV

SEQ ID NO: 1159 - protein, 12 aa, Homo sapiens
LHLGYLPNQLFR

SEQ ID NO: 1160 - protein, 9 aa, Hepatovirus A
ALFHEVAKL

SEQ ID NO: 1161 - protein, 9 aa, Hepatovirus A
LLYNCCYHV

SEQ ID NO: 1162 - protein, 9 aa, Hepatovirus A
MMFGFHHSV

SEQ ID NO: 1163 - protein, 9 aa, Hepatovirus A
QMMRNEFRV

SEQ ID NO: 1164 - protein, 9 aa, Hepatovirus A
SLMDLLSSL

SEQ ID NO: 1165 - protein, 10 aa, Homo sapiens
FLENVIRDAV

SEQ ID NO: 1166 - protein, 9 aa, H5N1 subtype
FQGRGVFEL

SEQ ID NO: 1167 - protein, 10 aa, Influenza A virus
FQVDCFLWHV

SEQ ID NO: 1168 - protein, 10 aa, Artificial Sequence
  unknown
VLSPADKTNV

SEQ ID NO: 1169 - protein, 10 aa, Human adenovirus 5
LLYANSAHAL

SEQ ID NO: 1170 - protein, 9 aa, Human gammaherpesvirus 8
IGLITVLFL

SEQ ID NO: 1171 - protein, 9 aa, Human papillomavirus type 11
KVLIRCYLC

SEQ ID NO: 1172 - protein, 9 aa, Human papillomavirus type 18
NLLIRCLRC

SEQ ID NO: 1173 - protein, 9 aa, Human parvovirus 4
RMTENIVEV

SEQ ID NO: 1174 - protein, 9 aa, Human papillomavirus type 11
SIDQLCKTF

SEQ ID NO: 1175 - protein, 9 aa, Human papillomavirus type 6b TIDQLCKTF <1176;PRT;Homo sapiens
RLFENYIEL

SEQ ID NO: 1176 - protein, 9 aa, Hepatitis C virus
RLGPVQNEI

SEQ ID NO: 1177 - protein, 9 aa, Toxoplasma gondii GT1
ALAEPVTGV

SEQ ID NO: 1178 - protein, 8 aa, Plasmodium falciparum FC27/Papua New Guinea
KLVFELSA

SEQ ID NO: 1179 - protein, 9 aa, Plasmodium falciparum FC27/Papua New Guinea
TQKCEIFNV

SEQ ID NO: 1180 - protein, 9 aa, Dengue virus  2 S221
AAAWYLWEV

SEQ ID NO: 1181 - protein, 10 aa, Dengue virus 2
AIYGAAFSGV

SEQ ID NO: 1182 - protein, 10 aa, Dengue virus  2
DLMRRGDLPV

SEQ ID NO: 1183 - protein, 10 aa, Dengue virus
ELMRRGDLPV

SEQ ID NO: 1184 - protein, 10 aa, Dengue virus  2
FLEEMLRTRV

SEQ ID NO: 1185 - protein, 10 aa, Dengue virus
FLMVLLIPEP

SEQ ID NO: 1186 - protein, 9 aa, Dengue virus 2 S221
GLLTVCYVL

SEQ ID NO: 1187 - protein, 9 aa, Dengue virus 2 S221
IILEFFLIV

SEQ ID NO: 1188 - protein, 9 aa, Dengue virus
IILEFFLMV

SEQ ID NO: 1189 - protein, 10 aa, Dengue virus
IILEFFLMVL

SEQ ID NO: 1190 - protein, 9 aa, Dengue virus  2
ILLVAVSFV

SEQ ID NO: 1191 - protein, 9 aa, Dengue virus 2 S221
IMAVGMVSI

SEQ ID NO: 1192 - protein, 10 aa, Dengue virus
KVLNPYMPSV

SEQ ID NO: 1193 - protein, 9 aa, Dengue virus  2
LLILCVTQV

SEQ ID NO: 1194 - protein, 9 aa, Dengue virus  2
LLLVAHYAI

SEQ ID NO: 1195 - protein, 10 aa, Dengue virus 2 S221
LLVISGLFPV

SEQ ID NO: 1196 - protein, 10 aa, Dengue virus  2
LMGLGKGWPL

SEQ ID NO: 1197 - protein, 9 aa, Dengue virus  2
LVISGLFPV

SEQ ID NO: 1198 - protein, 10 aa, Dengue virus  2
MLLILCVTQV

SEQ ID NO: 1199 - protein, 10 aa, Dengue virus  2
MMATIGIALL

SEQ ID NO: 1200 - protein, 9 aa, Dengue virus  2
RLITVNPIV

SEQ ID NO: 1201 - protein, 10 aa, Dengue virus
SIILEFFLMV

SEQ ID NO: 1202 - protein, 10 aa, Dengue virus  2
SLLFKTEDGV

SEQ ID NO: 1203 - protein, 10 aa, Dengue virus  2
TAAAWYLWEV

SEQ ID NO: 1204 - protein, 10 aa, Dengue virus  2
TLMAMDLGEL

SEQ ID NO: 1205 - protein, 10 aa, Dengue virus  2
TLYAVATTFV

SEQ ID NO: 1206 - protein, 10 aa, Dengue virus  2
TMTDDIGMGV

SEQ ID NO: 1207 - protein, 9 aa, Dengue virus 2 S221
YLPAIVREA

SEQ ID NO: 1208 - protein, 9 aa, Dengue virus  2
YQLAVTIMA

SEQ ID NO: 1209 - protein, 9 aa, Dengue virus  2
YVVIAILTV

SEQ ID NO: 1210 - protein, 10 aa, Dengue virus  2
YVVIAILTVV

SEQ ID NO: 1211 - protein, 9 aa, Mycobacterium tuberculosis H37Rv
TLAPQVEPL

SEQ ID NO: 1212 - protein, 9 aa, Mycobacterium tuberculosis H37Rv
YLAPQWEPV

SEQ ID NO: 1213 - protein, 8 aa, Human T-lymphotropic virus 1
LFEEYTNI

SEQ ID NO: 1214 - protein, 9 aa, Human T-lymphotropic virus 1
RVLTGWGLN

SEQ ID NO: 1215 - protein, 9 aa, Homo sapiens
KLIDRTESL

SEQ ID NO: 1216 - protein, 13 aa, Homo sapiens
RLDSYVRSLPHSS

SEQ ID NO: 1217 - protein, 9 aa, Mycobacterium tuberculosis H37Rv
AILIRVRNA

SEQ ID NO: 1218 - protein, 9 aa, Mycobacterium tuberculosis H37Rv
ALLALTRAI

SEQ ID NO: 1219 - protein, 9 aa, Mycobacterium tuberculosis H37Rv
ELAAEPTEV

SEQ ID NO: 1220 - protein, 9 aa, Mycobacterium tuberculosis H37Rv
GLWLSVAAV

SEQ ID NO: 1221 - protein, 9 aa, Mycobacterium tuberculosis H37Rv
GSFVRTVSL

SEQ ID NO: 1222 - protein, 9 aa, Mycobacterium tuberculosis H37Rv
HVYAHQAQT

SEQ ID NO: 1223 - protein, 9 aa, Mycobacterium tuberculosis H37Rv
IADAALAAL

SEQ ID NO: 1224 - protein, 9 aa, Mycobacterium tuberculosis H37Rv
LTRAILIRV

SEQ ID NO: 1225 - protein, 9 aa, Mycobacterium tuberculosis H37Rv
QAQTRHPAT

SEQ ID NO: 1226 - protein, 9 aa, Mycobacterium tuberculosis H37Rv
RTVSLPVGA

SEQ ID NO: 1227 - protein, 9 aa, Trypanosoma cruzi
TLLTIDGGI

SEQ ID NO: 1228 - protein, 9 aa, Trypanosoma cruzi
TLQPVERVL

SEQ ID NO: 1229 - protein, 9 aa, Vaccinia virus
IVIEAIAEH

SEQ ID NO: 1230 - protein, 9 aa, Vaccinia virus
IVLEAIHTV

SEQ ID NO: 1231 - protein, 9 aa, Homo sapiens
YLAPENGYL

SEQ ID NO: 1232 - protein, 9 aa, Homo sapiens
AIVDKVPSV

SEQ ID NO: 1233 - protein, 9 aa, Homo sapiens
ALDDMISTL

SEQ ID NO: 1234 - protein, 9 aa, Homo sapiens
ALDPASISV

SEQ ID NO: 1235 - protein, 9 aa, Homo sapiens
ALDQEIIEV

SEQ ID NO: 1236 - protein, 9 aa, Homo sapiens
ALLDKLYAL

SEQ ID NO: 1237 - protein, 9 aa, Homo sapiens
ALLDRIVSV

SEQ ID NO: 1238 - protein, 9 aa, Homo sapiens
ALMDEVVKA

SEQ ID NO: 1239 - protein, 9 aa, Homo sapiens
ALPEDLVEV

SEQ ID NO: 1240 - protein, 9 aa, Homo sapiens
AQFEHTILL

SEQ ID NO: 1241 - protein, 9 aa, Homo sapiens
AQYEHDLEV

SEQ ID NO: 1242 - protein, 9 aa, Homo sapiens
AVDGISLHL

SEQ ID NO: 1243 - protein, 9 aa, Homo sapiens
FIIQGLRSV

SEQ ID NO: 1244 - protein, 10 aa, Homo sapiens
FIKDYPVVSI

SEQ ID NO: 1245 - protein, 11 aa, Homo sapiens
FLADPSAFVAA

SEQ ID NO: 1246 - protein, 10 aa, Homo sapiens
FLAILGGAKV

SEQ ID NO: 1247 - protein, 11 aa, Homo sapiens
FLASESLIKQI

SEQ ID NO: 1248 - protein, 9 aa, Homo sapiens
FLDENVHFF

SEQ ID NO: 1249 - protein, 9 aa, Homo sapiens
FLDEPTNHL

SEQ ID NO: 1250 - protein, 9 aa, Homo sapiens
FLDGHDLQL

SEQ ID NO: 1251 - protein, 9 aa, Homo sapiens
FLDGNEMTL

SEQ ID NO: 1252 - protein, 9 aa, Homo sapiens
FLEKLLPPV

SEQ ID NO: 1253 - protein, 9 aa, Homo sapiens
FLSELTQQL

SEQ ID NO: 1254 - protein, 10 aa, Homo sapiens
FLSELTQQLA

SEQ ID NO: 1255 - protein, 9 aa, Homo sapiens
FVDDYTVRV

SEQ ID NO: 1256 - protein, 11 aa, Homo sapiens
GLMTTVHAITA

SEQ ID NO: 1257 - protein, 9 aa, Mycobacterium tuberculosis
GLTVAVAGA

SEQ ID NO: 1258 - protein, 11 aa, Homo sapiens
GLYGIKDDVFL

SEQ ID NO: 1259 - protein, 10 aa, Homo sapiens
HLDDLKGTFA

SEQ ID NO: 1260 - protein, 9 aa, Homo sapiens
HLDEARTLL

SEQ ID NO: 1261 - protein, 9 aa, Homo sapiens
HLFETISQA

SEQ ID NO: 1262 - protein, 9 aa, Homo sapiens
ILDDIGHGV

SEQ ID NO: 1263 - protein, 9 aa, Homo sapiens
ILDPHVVLL

SEQ ID NO: 1264 - protein, 9 aa, Mycobacterium tuberculosis
ILVAGLSGC

SEQ ID NO: 1265 - protein, 9 aa, Mycobacterium tuberculosis
KITGTATGV

SEQ ID NO: 1266 - protein, 9 aa, Homo sapiens
KMDEVLYSI

SEQ ID NO: 1267 - protein, 9 aa, Homo sapiens
KMDPIISRV

SEQ ID NO: 1268 - protein, 8 aa, Homo sapiens
KMGLIFEV

SEQ ID NO: 1269 - protein, 8 aa, Homo sapiens
KVASLIGV

SEQ ID NO: 1270 - protein, 8 aa, Homo sapiens
KVIENPYL

SEQ ID NO: 1271 - protein, 9 aa, Homo sapiens
LLMSFSVCL

SEQ ID NO: 1272 - protein, 9 aa, Homo sapiens
LLPTGVFQV

SEQ ID NO: 1273 - protein, 8 aa, Homo sapiens
LMEHIHKL

SEQ ID NO: 1274 - protein, 8 aa, Homo sapiens
MKHLPGPQ

SEQ ID NO: 1275 - protein, 9 aa, Homo sapiens
NLAENISRV

SEQ ID NO: 1276 - protein, 9 aa, Homo sapiens
NLMEQPIKV

SEQ ID NO: 1277 - protein, 9 aa, Homo sapiens
RLDDSLLYL

SEQ ID NO: 1278 - protein, 10 aa, Homo sapiens
RLDELGGVYL

SEQ ID NO: 1279 - protein, 9 aa, Homo sapiens
RQFSTPFQL

SEQ ID NO: 1280 - protein, 9 aa, Homo sapiens
RVADVIAQV

SEQ ID NO: 1281 - protein, 9 aa, Bos taurus
SLDKFLANV

SEQ ID NO: 1282 - protein, 9 aa, Homo sapiens
SLEPVAVEL

SEQ ID NO: 1283 - protein, 9 aa, Homo sapiens
TEADKSTVI

SEQ ID NO: 1284 - protein, 9 aa, Homo sapiens
TLDGSLHAV

SEQ ID NO: 1285 - protein, 11 aa, Homo sapiens
TLIDLPGITRV

SEQ ID NO: 1286 - protein, 9 aa, Homo sapiens
TLIGLSIKV

SEQ ID NO: 1287 - protein, 9 aa, Homo sapiens
TLSDLRVYL

SEQ ID NO: 1288 - protein, 10 aa, Homo sapiens
TLTEEGVIKV

SEQ ID NO: 1289 - protein, 10 aa, Homo sapiens
VIDSDLDVLL

SEQ ID NO: 1290 - protein, 9 aa, Homo sapiens
VLDDKDYFL

SEQ ID NO: 1291 - protein, 9 aa, Homo sapiens
VLDDKLVFV

SEQ ID NO: 1292 - protein, 11 aa, Homo sapiens
VLFENTDSVHL

SEQ ID NO: 1293 - protein, 9 aa, Homo sapiens
VLMTEDIKL

SEQ ID NO: 1294 - protein, 11 aa, Homo sapiens
VLPGVDALSNI

SEQ ID NO: 1295 - protein, 9 aa, Homo sapiens
VMAPHEPLV

SEQ ID NO: 1296 - protein, 9 aa, Homo sapiens
YLAERIPTL

SEQ ID NO: 1297 - protein, 10 aa, Homo sapiens
YLDEDTIYHL

SEQ ID NO: 1298 - protein, 9 aa, Homo sapiens
YLDQTLPRA

SEQ ID NO: 1299 - protein, 9 aa, Homo sapiens
YLFERIKEL

SEQ ID NO: 1300 - protein, 10 aa, Bos taurus
YLGDDYVRAM

SEQ ID NO: 1301 - protein, 10 aa, Homo sapiens
YVDDTQFVRF

SEQ ID NO: 1302 - protein, 9 aa, Homo sapiens
FIDKFTPPV

SEQ ID NO: 1303 - protein, 9 aa, Homo sapiens
FLLKLTPLL

SEQ ID NO: 1304 - protein, 10 aa, Human orthopneumovirus
FLTEAIVHSV

SEQ ID NO: 1305 - protein, 9 aa, Homo sapiens
FTWEGLYNV

SEQ ID NO: 1306 - protein, 11 aa, Homo sapiens
GPFGPPMPLHV

SEQ ID NO: 1307 - protein, 8 aa, Homo sapiens
LLGPTVML

SEQ ID NO: 1308 - protein, 9 aa, Homo sapiens
LLYGFVNYI

SEQ ID NO: 1309 - protein, 9 aa, Homo sapiens
LLYGFVNYV

SEQ ID NO: 1310 - protein, 10 aa, Homo sapiens
QVFPGLLERV

SEQ ID NO: 1311 - protein, 9 aa, Human metapneumovirus
SLQQEITLL

SEQ ID NO: 1312 - protein, 9 aa, Homo sapiens
SLWGGDVVL

SEQ ID NO: 1313 - protein, 10 aa, Homo sapiens
YLDLFGDPSV

SEQ ID NO: 1314 - protein, 10 aa, Mycobacterium tuberculosis H37Rv
IMILLVLVSA

SEQ ID NO: 1315 - protein, 9 aa, Mycobacterium tuberculosis H37Rv
LILATMLVA

SEQ ID NO: 1316 - protein, 9 aa, Homo sapiens
ALADGVQKV

SEQ ID NO: 1317 - protein, 9 aa, Homo sapiens
ALKKALAAA

SEQ ID NO: 1318 - protein, 9 aa, Homo sapiens
ALNIATHVL

SEQ ID NO: 1319 - protein, 9 aa, Homo sapiens
ALSSLIHAL

SEQ ID NO: 1320 - protein, 9 aa, Homo sapiens
ALVDHVAEL

SEQ ID NO: 1321 - protein, 10 aa, Homo sapiens
AVFDKTLAEL

SEQ ID NO: 1322 - protein, 9 aa, Homo sapiens
AVIGDVIRV

SEQ ID NO: 1323 - protein, 9 aa, Homo sapiens
DLHEKDFSL

SEQ ID NO: 1324 - protein, 9 aa, Homo sapiens
ELIERIPEL

SEQ ID NO: 1325 - protein, 9 aa, Homo sapiens
FASGLIHRV

SEQ ID NO: 1326 - protein, 9 aa, Homo sapiens
FIFSDTHEL

SEQ ID NO: 1327 - protein, 11 aa, Homo sapiens
FLDASGAKLDY

SEQ ID NO: 1328 - protein, 9 aa, Homo sapiens
FLFGEVHKA

SEQ ID NO: 1329 - protein, 9 aa, Homo sapiens
FLIRESETL

SEQ ID NO: 1330 - protein, 9 aa, Homo sapiens
FLVTVIHTL

SEQ ID NO: 1331 - protein, 9 aa, Homo sapiens
FMIIPTLII

SEQ ID NO: 1332 - protein, 9 aa, Homo sapiens
FQNPFRSEL

SEQ ID NO: 1333 - protein, 11 aa, Homo sapiens
GLADASLLKKV

SEQ ID NO: 1334 - protein, 9 aa, Homo sapiens
GLIDKVNEL

SEQ ID NO: 1335 - protein, 9 aa, Homo sapiens
GQNDIHHKV

SEQ ID NO: 1336 - protein, 10 aa, Homo sapiens
GVYGGSVHEA

SEQ ID NO: 1337 - protein, 9 aa, Homo sapiens
ILAAIVNHL

SEQ ID NO: 1338 - protein, 9 aa, Homo sapiens
ILAQEIVKA

SEQ ID NO: 1339 - protein, 9 aa, Homo sapiens
ILIDPFHKA

SEQ ID NO: 1340 - protein, 9 aa, Homo sapiens
ILISKLLGA

SEQ ID NO: 1341 - protein, 9 aa, Homo sapiens
ILVKHLTNV

SEQ ID NO: 1342 - protein, 9 aa, Homo sapiens
IQIMKVEEI

SEQ ID NO: 1343 - protein, 9 aa, Homo sapiens
ITQTVIHTV

SEQ ID NO: 1344 - protein, 11 aa, Homo sapiens
IVADHVASYGV

SEQ ID NO: 1345 - protein, 9 aa, Homo sapiens
KAISGVHTV

SEQ ID NO: 1346 - protein, 9 aa, Homo sapiens
KIYEGQVEV

SEQ ID NO: 1347 - protein, 10 aa, Homo sapiens
KLFEGENEHL

SEQ ID NO: 1348 - protein, 9 aa, Homo sapiens
KLIDDVHRL

SEQ ID NO: 1349 - protein, 9 aa, Homo sapiens
KLSDLDNKL

SEQ ID NO: 1350 - protein, 10 aa, Homo sapiens
KLYDIDVAKV

SEQ ID NO: 1351 - protein, 9 aa, Homo sapiens
KMPEINAKV

SEQ ID NO: 1352 - protein, 9 aa, Homo sapiens
KTASINQNV

SEQ ID NO: 1353 - protein, 9 aa, Homo sapiens
KVGPVPVLV

SEQ ID NO: 1354 - protein, 9 aa, Homo sapiens
LLSDTVQHL

SEQ ID NO: 1355 - protein, 10 aa, Homo sapiens
MMDPNSTQRY

SEQ ID NO: 1356 - protein, 9 aa, Homo sapiens
MVPRLTAVL

SEQ ID NO: 1357 - protein, 9 aa, Homo sapiens
NIIELVHQV

SEQ ID NO: 1358 - protein, 9 aa, Dengue virus 3
NIQTAINQV

SEQ ID NO: 1359 - protein, 9 aa, Homo sapiens
NLMEMVAQL

SEQ ID NO: 1360 - protein, 9 aa, Homo sapiens
QLAQFVHEV

SEQ ID NO: 1361 - protein, 9 aa, Homo sapiens
QLVDIIEKV

SEQ ID NO: 1362 - protein, 10 aa, Homo sapiens
RLYPEGLAQL

SEQ ID NO: 1363 - protein, 10 aa, Homo sapiens
RQYPWGTVQV

SEQ ID NO: 1364 - protein, 9 aa, Homo sapiens
RVSDINFTL

SEQ ID NO: 1365 - protein, 9 aa, Homo sapiens
SAVDFIRTL

SEQ ID NO: 1366 - protein, 9 aa, Homo sapiens
SIAEVVHQL

SEQ ID NO: 1367 - protein, 9 aa, Homo sapiens
SLADIAQKL

SEQ ID NO: 1368 - protein, 9 aa, Homo sapiens
SLIRSVVAL

SEQ ID NO: 1369 - protein, 9 aa, Homo sapiens
SQFSYQHAI

SEQ ID NO: 1370 - protein, 9 aa, Homo sapiens
SQVEILQRV

SEQ ID NO: 1371 - protein, 9 aa, Homo sapiens
SVITQVFHV

SEQ ID NO: 1372 - protein, 9 aa, Homo sapiens
TIAQLVHAV

SEQ ID NO: 1373 - protein, 9 aa, Homo sapiens
TINGHNAEV

SEQ ID NO: 1374 - protein, 9 aa, Dengue virus 2 Thailand/16681/84
TITEEIAVQ

SEQ ID NO: 1375 - protein, 9 aa, Homo sapiens
TLADLVHHV

SEQ ID NO: 1376 - protein, 9 aa, Homo sapiens
TVADHIQKV

SEQ ID NO: 1377 - protein, 9 aa, Homo sapiens
TVIAKVNNV

SEQ ID NO: 1378 - protein, 9 aa, Homo sapiens
TVMGRIATL

SEQ ID NO: 1379 - protein, 10 aa, Homo sapiens
VLFEKEVNEV

SEQ ID NO: 1380 - protein, 9 aa, Homo sapiens
VLKEIVERV

SEQ ID NO: 1381 - protein, 9 aa, Homo sapiens
VQIEEVRQV

SEQ ID NO: 1382 - protein, 10 aa, Dengue virus 2
VTLLCLIPTV

SEQ ID NO: 1383 - protein, 9 aa, Homo sapiens
YAYDGKDYI

SEQ ID NO: 1384 - protein, 11 aa, Homo sapiens
YAYDGKDYIAL

SEQ ID NO: 1385 - protein, 10 aa, Homo sapiens
YIYDKDMEII

SEQ ID NO: 1386 - protein, 9 aa, Homo sapiens
YLINEIDRI

SEQ ID NO: 1387 - protein, 9 aa, Homo sapiens
YLKDLIEEV

SEQ ID NO: 1388 - protein, 9 aa, Homo sapiens
YMAELIERL

SEQ ID NO: 1389 - protein, 9 aa, Homo sapiens
YMIAHITGL

SEQ ID NO: 1390 - protein, 9 aa, Homo sapiens
YTFPLAEKV

SEQ ID NO: 1391 - protein, 9 aa, Homo sapiens
YVKDRVEKV

SEQ ID NO: 1392 - protein, 9 aa, Hantaan orthohantavirus
FVVPILLKA

SEQ ID NO: 1393 - protein, 9 aa, H5N1 subtype
QLSTRGVQI

SEQ ID NO: 1394 - protein, 9 aa, Hantaan orthohantavirus
VPILLKALY

SEQ ID NO: 1395 - protein, 9 aa, Herpes simplex virus (type 1 / strain 17)
RMLGDVMAV

SEQ ID NO: 1396 - protein, 9 aa, Herpes simplex virus (type 1 / strain 17)
TMLEDHEFV

SEQ ID NO: 1397 - protein, 9 aa, Homo sapiens
ALAVLSVTL

SEQ ID NO: 1398 - protein, 9 aa, Homo sapiens
ALSEDLLSI

SEQ ID NO: 1399 - protein, 9 aa, Homo sapiens
GLLDQVAAL

SEQ ID NO: 1400 - protein, 9 aa, Homo sapiens
GLREDLLSL

SEQ ID NO: 1401 - protein, 9 aa, Homo sapiens
LLIGGFAGL

SEQ ID NO: 1402 - protein, 10 aa, Homo sapiens
SLQDVPLAAL

SEQ ID NO: 1403 - protein, 9 aa, Homo sapiens
ATYVFLHTV

SEQ ID NO: 1404 - protein, 9 aa, Homo sapiens
SLSTFQQMW

SEQ ID NO: 1405 - protein, 9 aa, Homo sapiens
STLHLVLRL

SEQ ID NO: 1406 - protein, 9 aa, Homo sapiens
QLSLLMWIT

SEQ ID NO: 1407 - protein, 9 aa, Human gammaherpesvirus 4
ALGGLLTMV

SEQ ID NO: 1408 - protein, 9 aa, Human gammaherpesvirus 4
CLGALLTMV

SEQ ID NO: 1409 - protein, 9 aa, Human gammaherpesvirus 4
CLGGLATMV

SEQ ID NO: 1410 - protein, 9 aa, Human gammaherpesvirus 4
CLGGLLAMV

SEQ ID NO: 1411 - protein, 9 aa, Homo sapiens
ALGDLFQSI

SEQ ID NO: 1412 - protein, 10 aa, Homo sapiens
AVAANIVLTV

SEQ ID NO: 1413 - protein, 10 aa, Trypanosoma cruzi
AVPEVTDVTL

SEQ ID NO: 1414 - protein, 9 aa, Trypanosoma cruzi
DIIEQMKGV

SEQ ID NO: 1415 - protein, 9 aa, Homo sapiens
DLTSFLLSL

SEQ ID NO: 1416 - protein, 9 aa, Homo sapiens
EILGALLSI

SEQ ID NO: 1417 - protein, 10 aa, Homo sapiens
FLLSLFSLWL

SEQ ID NO: 1418 - protein, 10 aa, Trypanosoma cruzi
FVSCCGELTV

SEQ ID NO: 1419 - protein, 9 aa, Trypanosoma cruzi
GVSGVINAL

SEQ ID NO: 1420 - protein, 9 aa, Homo sapiens
HIAGSLAVV

SEQ ID NO: 1421 - protein, 10 aa, Homo sapiens
ILAVDGVLSV

SEQ ID NO: 1422 - protein, 9 aa, Homo sapiens
ILGALLSIL

SEQ ID NO: 1423 - protein, 9 aa, Homo sapiens
ILKDFSILL

SEQ ID NO: 1424 - protein, 9 aa, Homo sapiens
ILSAHVATA

SEQ ID NO: 1425 - protein, 10 aa, Homo sapiens
ILVLASTITI

SEQ ID NO: 1426 - protein, 9 aa, Trypanosoma cruzi
KLEKIEDEL

SEQ ID NO: 1427 - protein, 9 aa, Homo sapiens
LLIDLTSFL

SEQ ID NO: 1428 - protein, 10 aa, Homo sapiens
LLMEGVPKSL

SEQ ID NO: 1429 - protein, 9 aa, Trypanosoma cruzi
RLYKTLGQL

SEQ ID NO: 1430 - protein, 9 aa, Homo sapiens
SISVLISAL

SEQ ID NO: 1431 - protein, 10 aa, Homo sapiens
SLNYSGVKEL

SEQ ID NO: 1432 - protein, 10 aa, Homo sapiens
SVHSLHIWSL

SEQ ID NO: 1433 - protein, 9 aa, Homo sapiens
VVTGVLVYL

SEQ ID NO: 1434 - protein, 9 aa, Homo sapiens
ALLKDTVYT

SEQ ID NO: 1435 - protein, 9 aa, Homo sapiens
FIFSILVLA

SEQ ID NO: 1436 - protein, 9 aa, Homo sapiens
IQATVMIIV

SEQ ID NO: 1437 - protein, 9 aa, Homo sapiens
KMYAFTLES

SEQ ID NO: 1438 - protein, 9 aa, Homo sapiens
KSLNYSGVK

SEQ ID NO: 1439 - protein, 9 aa, Homo sapiens
LAVDGVLSV

SEQ ID NO: 1440 - protein, 9 aa, Homo sapiens
LLSILCIWV

SEQ ID NO: 1441 - protein, 9 aa, Homo sapiens
LLSLFSLWL

SEQ ID NO: 1442 - protein, 9 aa, Homo sapiens
MLLDKNIPI

SEQ ID NO: 1443 - protein, 9 aa, Homo sapiens
RLLYPDYQI

SEQ ID NO: 1444 - protein, 9 aa, Homo sapiens
TMHSLTIQM

SEQ ID NO: 1445 - protein, 9 aa, Homo sapiens
VAANIVLTV

SEQ ID NO: 1446 - protein, 8 aa, Homo sapiens
VLHDDLLE

SEQ ID NO: 1447 - protein, 9 aa, Mycobacterium tuberculosis H37Rv
LIASNVAGV

SEQ ID NO: 1448 - protein, 9 aa, Human T-lymphotropic virus 1
GLLSLEEEL

SEQ ID NO: 1449 - protein, 10 aa, Homo sapiens
FATGIGIITV

SEQ ID NO: 1450 - protein, 10 aa, Homo sapiens
FLTGIGIITV

SEQ ID NO: 1451 - protein, 9 aa, Homo sapiens
KAMELIREL

SEQ ID NO: 1452 - protein, 10 aa, Homo sapiens
KISRETGEKL

SEQ ID NO: 1453 - protein, 9 aa, Homo sapiens
KTLERSYLL

SEQ ID NO: 1454 - protein, 9 aa, Homo sapiens
KVIEINPYL

SEQ ID NO: 1455 - protein, 9 aa, Homo sapiens
RTVEKTWKL

SEQ ID NO: 1456 - protein, 9 aa, Homo sapiens
TVAPFNPTV

SEQ ID NO: 1457 - protein, 9 aa, Homo sapiens
VTTDIQVKV

SEQ ID NO: 1458 - protein, 9 aa, Human herpesvirus 6 strain Z29
GILDFGVKL

SEQ ID NO: 1459 - protein, 9 aa, Human herpesvirus 6 strain Z29
ILYGPLTRI

SEQ ID NO: 1460 - protein, 9 aa, Human herpesvirus 6 strain Z29
LLCGNLLIL

SEQ ID NO: 1461 - protein, 9 aa, Human herpesvirus 6 strain Z29
MLWYTVYNI

SEQ ID NO: 1462 - protein, 9 aa, Influenza A virus (A/mallard/Quebec/10969/2006(H2N3))
MTIIFLILM

SEQ ID NO: 1463 - protein, 11 aa, Influenza A virus (A/Yokohama/22/2002(H1N2))
PVAGGTSSIYI

SEQ ID NO: 1464 - protein, 9 aa, Human herpesvirus 6 strain Z29
SLMSGVEPL

SEQ ID NO: 1465 - protein, 8 aa, Influenza A virus  (A/duck/Vietnam/37/2007(H5N1))
TVIKTNMI

SEQ ID NO: 1466 - protein, 9 aa, Influenza A virus (A/Memphis/10/1996(H1N1))
YINTALLNA

SEQ ID NO: 1467 - protein, 9 aa, Influenza A virus
GILGFVTTL

SEQ ID NO: 1468 - protein, 10 aa, Homo sapiens
ALWGPDPAAV

SEQ ID NO: 1469 - protein, 10 aa, Homo sapiens
AQWGPDPAAV

SEQ ID NO: 1470 - protein, 10 aa, Homo sapiens
RQWGPDPAAV

SEQ ID NO: 1471 - protein, 10 aa, Hepatitis B virus
FLGPLLVLQA

SEQ ID NO: 1472 - protein, 9 aa, Hepatitis C virus genotype 1
WLGNIIMYA

SEQ ID NO: 1473 - protein, 11 aa, Homo sapiens
FFAGGIGIRTI

SEQ ID NO: 1474 - protein, 11 aa, Homo sapiens
FLAGGIGIRTL

SEQ ID NO: 1475 - protein, 9 aa, Homo sapiens
FWLLGAWAL

SEQ ID NO: 1476 - protein, 9 aa, Homo sapiens
FWLLPAWAL

SEQ ID NO: 1477 - protein, 9 aa, Homo sapiens
ILAKFLHWL

SEQ ID NO: 1478 - protein, 8 aa, Homo sapiens
WLLPAWGV

SEQ ID NO: 1479 - protein, 8 aa, Homo sapiens
WLLPTWGV

SEQ ID NO: 1480 - protein, 9 aa, Human immunodeficiency virus 1
SLFNAVATL

SEQ ID NO: 1481 - protein, 9 aa, Human immunodeficiency virus 1
SLFNTIATL

SEQ ID NO: 1482 - protein, 9 aa, Human immunodeficiency virus 1
SLFNTVATV

SEQ ID NO: 1483 - protein, 9 aa, Human immunodeficiency virus 1
SLFNTVAVL

SEQ ID NO: 1484 - protein, 9 aa, Human immunodeficiency virus 1
SLFNTVVTL

SEQ ID NO: 1485 - protein, 9 aa, Yellow fever virus 17D
AMDTISVFL

SEQ ID NO: 1486 - protein, 9 aa, Yellow fever virus 17D
VMLFILAGL

SEQ ID NO: 1487 - protein, 10 aa, Dengue virus
CLMMMLPATL

SEQ ID NO: 1488 - protein, 10 aa, Dengue virus
FTMGVLCLAI

SEQ ID NO: 1489 - protein, 10 aa, Dengue virus
ITLLCLIPTV

SEQ ID NO: 1490 - protein, 10 aa, Dengue virus
LMLLALIAVL

SEQ ID NO: 1491 - protein, 9 aa, Dengue virus
LMMMLPATL

SEQ ID NO: 1492 - protein, 10 aa, Dengue virus
LMMMLPATLA

SEQ ID NO: 1493 - protein, 9 aa, Dengue virus
MMMLPATLA

SEQ ID NO: 1494 - protein, 9 aa, Homo sapiens
QLLNSVLTL

SEQ ID NO: 1495 - protein, 9 aa, Dengue virus
TLLCLIPTV

SEQ ID NO: 1496 - protein, 10 aa, Dengue virus
TLMLLALIAV

SEQ ID NO: 1497 - protein, 10 aa, Dengue virus
TLTAAVLLLV

SEQ ID NO: 1498 - protein, 10 aa, Dengue virus
VLLLVTHYAI

SEQ ID NO: 1499 - protein, 9 aa, Dengue virus
VTYECPLLV

SEQ ID NO: 1500 - protein, 9 aa, Human herpesvirus 4 strain B95-8
SLGGLLTMA

SEQ ID NO: 1501 - protein, 9 aa, Rift Valley fever virus
ILDAHSLYL

SEQ ID NO: 1502 - protein, 9 aa, Rift Valley fever virus
VLSEWLPVT

SEQ ID NO: 1503 - protein, 9 aa, Homo sapiens
GLVPFLVSV

SEQ ID NO: 1504 - protein, 9 aa, Influenza A virus (A/Netherlands/602/2009(H1N1))
AIMEKNIVL

SEQ ID NO: 1505 - protein, 9 aa, Influenza A virus (A/Netherlands/602/2009(H1N1))
AVMEKNIVL

SEQ ID NO: 1506 - protein, 9 aa, Dengue virus
ALPVYLMTL

SEQ ID NO: 1507 - protein, 9 aa, Dengue virus
ALSEGVYRI

SEQ ID NO: 1508 - protein, 10 aa, Dengue virus
GLFGKTQVGV

SEQ ID NO: 1509 - protein, 9 aa, Dengue virus 3
KLNDWDFVV

SEQ ID NO: 1510 - protein, 9 aa, Dengue virus
KLTDWDFVV

SEQ ID NO: 1511 - protein, 9 aa, Human T-lymphotropic virus 1
LLFGFPVYV

SEQ ID NO: 1512 - protein, 9 aa, Dengue virus 3
SMINGVVKL

SEQ ID NO: 1513 - protein, 9 aa, Dengue virus 3
TTWEDVPYL

SEQ ID NO: 1514 - protein, 9 aa, Dengue virus  1
VLDDGIYRI

SEQ ID NO: 1515 - protein, 13 aa, Human T-lymphotropic virus 1
LLFGFAVYVSCMF

SEQ ID NO: 1516 - protein, 13 aa, Human T-lymphotropic virus 1
LLFGFPVFVSCMF

SEQ ID NO: 1517 - protein, 9 aa, Human T-lymphotropic virus 1
LLFGYPVFV

SEQ ID NO: 1518 - protein, 9 aa, Hepatitis B virus
VCWGELMNL

SEQ ID NO: 1519 - protein, 9 aa, Human rotavirus A
FLDSEPHLL

SEQ ID NO: 1520 - protein, 9 aa, Human betaherpesvirus 5 FMDILTTCVET <1522;PRT;Human rotavirus A
SLISGMWLL

SEQ ID NO: 1521 - protein, 11 aa, Human rotavirus A
SLMDPAILTSL

SEQ ID NO: 1522 - protein, 8 aa, Human rotavirus A
YLLPGWKL

SEQ ID NO: 1523 - protein, 9 aa, Vaccinia virus Copenhagen
DIDEILEKV

SEQ ID NO: 1524 - protein, 9 aa, Vaccinia virus Copenhagen
DIEIVKLLL

SEQ ID NO: 1525 - protein, 9 aa, Vaccinia virus Copenhagen
DVYVKIDNV

SEQ ID NO: 1526 - protein, 9 aa, Vaccinia virus WR
EIINNITAV

SEQ ID NO: 1527 - protein, 9 aa, Vaccinia virus Copenhagen
ELLNILTEL

SEQ ID NO: 1528 - protein, 9 aa, Vaccinia virus Copenhagen
EVNKALYDL

SEQ ID NO: 1529 - protein, 9 aa, Vaccinia virus WR
FVEPEELNL

SEQ ID NO: 1530 - protein, 9 aa, Vaccinia virus Copenhagen
ILMRHLKNL

SEQ ID NO: 1531 - protein, 9 aa, Vaccinia virus WR
KIDDMIEEV

SEQ ID NO: 1532 - protein, 9 aa, Vaccinia virus Copenhagen
KIGPPTVTL

SEQ ID NO: 1533 - protein, 9 aa, Vaccinia virus WR
KIIQRVQDL

SEQ ID NO: 1534 - protein, 10 aa, Vaccinia virus WR
KIRSDNIKKL

SEQ ID NO: 1535 - protein, 9 aa, Vaccinia virus WR
KLTELNAEL

SEQ ID NO: 1536 - protein, 9 aa, Vaccinia virus Copenhagen
KVLDIDEIL

SEQ ID NO: 1537 - protein, 9 aa, Vaccinia virus Copenhagen
KVVKLTPQV

SEQ ID NO: 1538 - protein, 9 aa, Vaccinia virus WR
LILDPKINV

SEQ ID NO: 1539 - protein, 9 aa, Vaccinia virus Copenhagen
MIKPCCERV

SEQ ID NO: 1540 - protein, 10 aa, Vaccinia virus WR
PLALYSADKV

SEQ ID NO: 1541 - protein, 9 aa, Vaccinia virus Copenhagen
QIDVEKKIV

SEQ ID NO: 1542 - protein, 9 aa, Vaccinia virus WR
QVSIIQEKL

SEQ ID NO: 1543 - protein, 10 aa, Vaccinia virus Copenhagen
SIHTIKTLGV

SEQ ID NO: 1544 - protein, 10 aa, Vaccinia virus Copenhagen
SIIFGRQPSL

SEQ ID NO: 1545 - protein, 9 aa, Vaccinia virus Copenhagen
TIEELKQKL

SEQ ID NO: 1546 - protein, 9 aa, Vaccinia virus Copenhagen
TIINKFFEV

SEQ ID NO: 1547 - protein, 9 aa, Vaccinia virus Copenhagen
TINDLKMML

SEQ ID NO: 1548 - protein, 10 aa, Vaccinia virus Copenhagen
TLIGNFAAHL

SEQ ID NO: 1549 - protein, 9 aa, Vaccinia virus WR
TLRVLQDQL

SEQ ID NO: 1550 - protein, 9 aa, Vaccinia virus Copenhagen
TVMINNVKL

SEQ ID NO: 1551 - protein, 9 aa, Vaccinia virus Copenhagen
TVYDINNEV

SEQ ID NO: 1552 - protein, 9 aa, Vaccinia virus WR
VLESCWPDV

SEQ ID NO: 1553 - protein, 9 aa, Vaccinia virus Copenhagen
VLISPVSIL

SEQ ID NO: 1554 - protein, 9 aa, Vaccinia virus Copenhagen
VLNDQYAKV

SEQ ID NO: 1555 - protein, 10 aa, Vaccinia virus WR
YILNSLTKGL

SEQ ID NO: 1556 - protein, 9 aa, Vaccinia virus Copenhagen
YINNNIEEI

SEQ ID NO: 1557 - protein, 9 aa, Vaccinia virus Copenhagen
YITNRLELL

SEQ ID NO: 1558 - protein, 10 aa, Vaccinia virus Copenhagen
YLLDRGADIV

SEQ ID NO: 1559 - protein, 9 aa, Human immunodeficiency virus 1
ALYNTVATL

SEQ ID NO: 1560 - protein, 9 aa, Human immunodeficiency virus 1
SLFNAVAVL

SEQ ID NO: 1561 - protein, 9 aa, Human immunodeficiency virus 1
SLFNTIAVL

SEQ ID NO: 1562 - protein, 9 aa, Human immunodeficiency virus 1
SLYLTVATL

SEQ ID NO: 1563 - protein, 9 aa, Human immunodeficiency virus 1
SLYNSVATL

SEQ ID NO: 1564 - protein, 9 aa, Human immunodeficiency virus 1
SLYNTAATL

SEQ ID NO: 1565 - protein, 9 aa, Human immunodeficiency virus 1
SLYNTIAIL

SEQ ID NO: 1566 - protein, 9 aa, Human immunodeficiency virus 1
SLYNTIATL

SEQ ID NO: 1567 - protein, 9 aa, Human immunodeficiency virus 1
SLYNTISVL

SEQ ID NO: 1568 - protein, 9 aa, Human immunodeficiency virus 1
SLYNTITVL

SEQ ID NO: 1569 - protein, 9 aa, Human immunodeficiency virus 1
SLYNTVAAL

SEQ ID NO: 1570 - protein, 9 aa, Human immunodeficiency virus 1
SLYNTVAIF

SEQ ID NO: 1571 - protein, 9 aa, Human immunodeficiency virus 1
SLYNTVAVL

SEQ ID NO: 1572 - protein, 9 aa, Human immunodeficiency virus 1
SLYNTVSTL

SEQ ID NO: 1573 - protein, 9 aa, Human immunodeficiency virus 1
SLYNTVVTL

SEQ ID NO: 1574 - protein, 9 aa, Human immunodeficiency virus 1
SLYQTVATL

SEQ ID NO: 1575 - protein, 9 aa, Human immunodeficiency virus 1
SVYNTVATL

SEQ ID NO: 1576 - protein, 9 aa, Mycobacterium tuberculosis
ALADLPVTV

SEQ ID NO: 1577 - protein, 9 aa, Mycobacterium tuberculosis
AMLDHAGDM

SEQ ID NO: 1578 - protein, 9 aa, Mycobacterium tuberculosis
SIIIPTLNV

SEQ ID NO: 1579 - protein, 9 aa, Mycobacterium tuberculosis
VLAGSVDEL

SEQ ID NO: 1580 - protein, 10 aa, Homo sapiens
ALAGIGILTV

SEQ ID NO: 1581 - protein, 10 aa, Homo sapiens
ELAAIGILTV

SEQ ID NO: 1582 - protein, 10 aa, Homo sapiens
ELAGIAILTV

SEQ ID NO: 1583 - protein, 10 aa, Homo sapiens
ELAGIGALTV

SEQ ID NO: 1584 - protein, 10 aa, Homo sapiens
ELAGIGIATV

SEQ ID NO: 1585 - protein, 10 aa, Homo sapiens
ELAGIGILAV

SEQ ID NO: 1586 - protein, 10 aa, Hepatitis C virus
KLLGLGINAV

SEQ ID NO: 1587 - protein, 10 aa, Hepatitis C virus
KLSGLGINAI

SEQ ID NO: 1588 - protein, 10 aa, Human immunodeficiency virus 1
KSLFNTIATL

SEQ ID NO: 1589 - protein, 10 aa, Human immunodeficiency virus 1
KSLYNTIATL

SEQ ID NO: 1590 - protein, 10 aa, Human immunodeficiency virus 1
KSLYNTIAVL

SEQ ID NO: 1591 - protein, 10 aa, Human immunodeficiency virus 1
KSLYNTVAVL

SEQ ID NO: 1592 - protein, 10 aa, Human immunodeficiency virus 1
RSLFNTIATL

SEQ ID NO: 1593 - protein, 10 aa, Human immunodeficiency virus 1
RSLFNTIAVL

SEQ ID NO: 1594 - protein, 10 aa, Human immunodeficiency virus 1
RSLFNTVAVL

SEQ ID NO: 1595 - protein, 10 aa, Human immunodeficiency virus 1
RSLYNTIATL

SEQ ID NO: 1596 - protein, 10 aa, Human immunodeficiency virus 1
RSLYNTIAVL

SEQ ID NO: 1597 - protein, 10 aa, Human immunodeficiency virus 1
SLFNTIATLY

SEQ ID NO: 1598 - protein, 10 aa, Human immunodeficiency virus 1
SLFNTVAVLY

SEQ ID NO: 1599 - protein, 10 aa, Human immunodeficiency virus 1
SLYNTIATLY

SEQ ID NO: 1600 - protein, 10 aa, Human immunodeficiency virus 1
SLYNTIAVLY

SEQ ID NO: 1601 - protein, 10 aa, Human immunodeficiency virus 1
SLYNTVATLY

SEQ ID NO: 1602 - protein, 10 aa, Human immunodeficiency virus 1
SLYNTVAVLY

SEQ ID NO: 1603 - protein, 9 aa, Homo sapiens
KLGPAGTTI

SEQ ID NO: 1604 - protein, 10 aa, Homo sapiens
RVAPEEHPVL

SEQ ID NO: 1605 - protein, 9 aa, Homo sapiens
RYLEQLHQL

SEQ ID NO: 1606 - protein, 11 aa, Homo sapiens
YQFDKVGILTL

SEQ ID NO: 1607 - protein, 12 aa, Homo sapiens
AIKKKDELERVA

SEQ ID NO: 1608 - protein, 10 aa, Homo sapiens
AILETAPKEV

SEQ ID NO: 1609 - protein, 9 aa, Homo sapiens
AILTVVPKI

SEQ ID NO: 1610 - protein, 9 aa, Homo sapiens
AIVRSLPSV

SEQ ID NO: 1611 - protein, 9 aa, Homo sapiens
ALAAALAHI

SEQ ID NO: 1612 - protein, 9 aa, Homo sapiens
ALAALHVTL

SEQ ID NO: 1613 - protein, 11 aa, Homo sapiens
ALADKELLPSV

SEQ ID NO: 1614 - protein, 10 aa, Homo sapiens
ALAEIAKAEL

SEQ ID NO: 1615 - protein, 12 aa, Homo sapiens
ALAGHQDGITFI

SEQ ID NO: 1616 - protein, 9 aa, Homo sapiens
ALAKEIDSV

SEQ ID NO: 1617 - protein, 9 aa, Homo sapiens
ALAKLVEAI

SEQ ID NO: 1618 - protein, 9 aa, Homo sapiens
ALANHLIKV

SEQ ID NO: 1619 - protein, 9 aa, Homo sapiens
ALAQRLLEV

SEQ ID NO: 1620 - protein, 9 aa, Homo sapiens
ALATLIHQV

SEQ ID NO: 1621 - protein, 9 aa, Homo sapiens
ALDEYNMKI

SEQ ID NO: 1622 - protein, 9 aa, Homo sapiens
ALDKALTSV

SEQ ID NO: 1623 - protein, 10 aa, Homo sapiens
ALDPASLPRV

SEQ ID NO: 1624 - protein, 9 aa, Homo sapiens
ALDSQVPKV

SEQ ID NO: 1625 - protein, 9 aa, Homo sapiens
ALEEKIPNI

SEQ ID NO: 1626 - protein, 12 aa, Homo sapiens
ALFDQDKSSMRL

SEQ ID NO: 1627 - protein, 10 aa, Homo sapiens
ALFDSGLHPA

SEQ ID NO: 1628 - protein, 9 aa, Homo sapiens
ALFEGKVQL

SEQ ID NO: 1629 - protein, 8 aa, Homo sapiens
ALFKAWAL

SEQ ID NO: 1630 - protein, 10 aa, Homo sapiens
ALFQPHLINV

SEQ ID NO: 1631 - protein, 9 aa, Homo sapiens
ALFQRPPLI

SEQ ID NO: 1632 - protein, 11 aa, Homo sapiens
ALGAGIERMGL

SEQ ID NO: 1633 - protein, 9 aa, Homo sapiens
ALGPTGRGV

SEQ ID NO: 1634 - protein, 11 aa, Homo sapiens
ALGTDAEGQKV

SEQ ID NO: 1635 - protein, 9 aa, Homo sapiens
ALIARVTNV

SEQ ID NO: 1636 - protein, 9 aa, Homo sapiens
ALIDRMVNL

SEQ ID NO: 1637 - protein, 11 aa, Homo sapiens
ALIEAEKVAQV

SEQ ID NO: 1638 - protein, 9 aa, Homo sapiens
ALIEKLVEL

SEQ ID NO: 1639 - protein, 9 aa, Homo sapiens
ALITRIFGV

SEQ ID NO: 1640 - protein, 9 aa, Homo sapiens
ALKDLINEA

SEQ ID NO: 1641 - protein, 10 aa, Homo sapiens
ALLAGPLRPA

SEQ ID NO: 1642 - protein, 11 aa, Homo sapiens
ALLAGSEYLKL

SEQ ID NO: 1643 - protein, 10 aa, Homo sapiens
ALLDGRLQVV

SEQ ID NO: 1644 - protein, 9 aa, Homo sapiens
ALLDSAHLL

SEQ ID NO: 1645 - protein, 12 aa, Homo sapiens
ALLEDEERVVRL

SEQ ID NO: 1646 - protein, 9 aa, Homo sapiens
ALLEMDARL

SEQ ID NO: 1647 - protein, 9 aa, Homo sapiens
ALLGDLTKA

SEQ ID NO: 1648 - protein, 9 aa, Homo sapiens
ALLGILQHV

SEQ ID NO: 1649 - protein, 9 aa, Herpes simplex virus (type 1 / strain 17)
ALLGLTLGV

SEQ ID NO: 1650 - protein, 9 aa, Homo sapiens
ALLGRIPSA

SEQ ID NO: 1651 - protein, 9 aa, Homo sapiens
ALLKGLAAV

SEQ ID NO: 1652 - protein, 8 aa, Homo sapiens
ALLKQVEI

SEQ ID NO: 1653 - protein, 9 aa, Homo sapiens
ALLQQVHSA

SEQ ID NO: 1654 - protein, 9 aa, Homo sapiens
ALLSGLREA

SEQ ID NO: 1655 - protein, 12 aa, Homo sapiens
ALMDLDVKKMPL

SEQ ID NO: 1656 - protein, 11 aa, Homo sapiens
ALMEQVAHQTI

SEQ ID NO: 1657 - protein, 9 aa, Homo sapiens
ALMSRPAQV

SEQ ID NO: 1658 - protein, 11 aa, Homo sapiens
ALNEEAGRLLL

SEQ ID NO: 1659 - protein, 9 aa, Homo sapiens
ALNELLQHV

SEQ ID NO: 1660 - protein, 9 aa, Homo sapiens
ALNEQIARL

SEQ ID NO: 1661 - protein, 9 aa, Homo sapiens
ALNGKLYIV

SEQ ID NO: 1662 - protein, 9 aa, Homo sapiens
ALQEKLWNV

SEQ ID NO: 1663 - protein, 9 aa, Homo sapiens
ALQEKVQAV

SEQ ID NO: 1664 - protein, 9 aa, Homo sapiens
ALQEMVHQV

SEQ ID NO: 1665 - protein, 9 aa, Homo sapiens
ALQSLIPSL

SEQ ID NO: 1666 - protein, 9 aa, Homo sapiens
ALRDVSEEL

SEQ ID NO: 1667 - protein, 9 aa, Homo sapiens
ALREENEQL

SEQ ID NO: 1668 - protein, 9 aa, Homo sapiens
ALRGEIETV

SEQ ID NO: 1669 - protein, 9 aa, Homo sapiens
ALSEKLARL

SEQ ID NO: 1670 - protein, 10 aa, Homo sapiens
ALSKEGIVAL

SEQ ID NO: 1671 - protein, 9 aa, Homo sapiens
ALSNLEVKL

SEQ ID NO: 1672 - protein, 9 aa, Homo sapiens
ALTRLHITV

SEQ ID NO: 1673 - protein, 10 aa, Homo sapiens
ALVDHLNVGV

SEQ ID NO: 1674 - protein, 9 aa, Homo sapiens
ALVSSLHLL

SEQ ID NO: 1675 - protein, 10 aa, Homo sapiens
ALWEDEGVRA

SEQ ID NO: 1676 - protein, 9 aa, Homo sapiens
ALWEGPSKA

SEQ ID NO: 1677 - protein, 11 aa, Homo sapiens
ALWSVGGEVHV

SEQ ID NO: 1678 - protein, 9 aa, Homo sapiens
ALYASRLYL

SEQ ID NO: 1679 - protein, 9 aa, Homo sapiens
ALYDEVRTV

SEQ ID NO: 1680 - protein, 9 aa, Homo sapiens
ALYDNVEKL

SEQ ID NO: 1681 - protein, 9 aa, Homo sapiens
ALYGKLLKL

SEQ ID NO: 1682 - protein, 11 aa, Homo sapiens
ALYGRAEAAEV

SEQ ID NO: 1683 - protein, 9 aa, Homo sapiens
ALYHLAIKL

SEQ ID NO: 1684 - protein, 11 aa, Homo sapiens
ALYNDISHMKI

SEQ ID NO: 1685 - protein, 10 aa, Homo sapiens
AMAQEGLREV

SEQ ID NO: 1686 - protein, 10 aa, Homo sapiens
AMFDHIPVGV

SEQ ID NO: 1687 - protein, 9 aa, Homo sapiens
AMFGKLMTI

SEQ ID NO: 1688 - protein, 9 aa, Homo sapiens
AMLAVLHTV

SEQ ID NO: 1689 - protein, 11 aa, Homo sapiens
AMLENASDIKL

SEQ ID NO: 1690 - protein, 9 aa, Homo sapiens
AMLTVLHEI

SEQ ID NO: 1691 - protein, 9 aa, Homo sapiens
AMNGHVPAV

SEQ ID NO: 1692 - protein, 9 aa, Homo sapiens
AMWEHPITA

SEQ ID NO: 1693 - protein, 9 aa, Homo sapiens
AMYEHKIFV

SEQ ID NO: 1694 - protein, 9 aa, Homo sapiens
ATIQRIPEV

SEQ ID NO: 1695 - protein, 10 aa, Homo sapiens
AVIDVGINRV

SEQ ID NO: 1696 - protein, 12 aa, Homo sapiens
AVTKTAGPIASA

SEQ ID NO: 1697 - protein, 9 aa, Homo sapiens
DLKDQIQDV

SEQ ID NO: 1698 - protein, 10 aa, Homo sapiens
DVIRHGADAV

SEQ ID NO: 1699 - protein, 9 aa, Homo sapiens
EITNVTQKI

SEQ ID NO: 1700 - protein, 9 aa, Homo sapiens
EMEKKLKEI

SEQ ID NO: 1701 - protein, 9 aa, Homo sapiens
FASHVSPEV

SEQ ID NO: 1702 - protein, 10 aa, Homo sapiens
FIFDVHVHEV

SEQ ID NO: 1703 - protein, 10 aa, Homo sapiens
FIFEKKLAQA

SEQ ID NO: 1704 - protein, 10 aa, Homo sapiens
FIFSEKPVFV

SEQ ID NO: 1705 - protein, 10 aa, Homo sapiens
FIIEKQPPQV

SEQ ID NO: 1706 - protein, 9 aa, Homo sapiens
FIINGIEKV

SEQ ID NO: 1707 - protein, 10 aa, Homo sapiens
FIMEGPLTRI

SEQ ID NO: 1708 - protein, 10 aa, Homo sapiens
FIMEGTLTRV

SEQ ID NO: 1709 - protein, 9 aa, Homo sapiens
FINARNWTL

SEQ ID NO: 1710 - protein, 9 aa, Homo sapiens
FINIVVHSV

SEQ ID NO: 1711 - protein, 9 aa, Homo sapiens
FIQEIEHAL

SEQ ID NO: 1712 - protein, 9 aa, Homo sapiens
FISEFEHRV

SEQ ID NO: 1713 - protein, 9 aa, Homo sapiens
FIWENIHTL

SEQ ID NO: 1714 - protein, 10 aa, Homo sapiens
FIYHGEVPQA

SEQ ID NO: 1715 - protein, 10 aa, Homo sapiens
FLADVDKLKL

SEQ ID NO: 1716 - protein, 10 aa, Homo sapiens
FLAEDPKVTL

SEQ ID NO: 1717 - protein, 9 aa, Homo sapiens
FLAEHDYGL

SEQ ID NO: 1718 - protein, 10 aa, Homo sapiens
FLAEHPNVTL

SEQ ID NO: 1719 - protein, 11 aa, Homo sapiens
FLAHDQAVRTL

SEQ ID NO: 1720 - protein, 9 aa, Homo sapiens
FLANIGTSV

SEQ ID NO: 1721 - protein, 9 aa, Homo sapiens
FLAVKPDGV

SEQ ID NO: 1722 - protein, 9 aa, Homo sapiens
FLAVRVQQV

SEQ ID NO: 1723 - protein, 9 aa, Homo sapiens
FLDASGAKL

SEQ ID NO: 1724 - protein, 9 aa, Homo sapiens
FLDDVVHSL

SEQ ID NO: 1725 - protein, 9 aa, Homo sapiens
FLDENVHFA

SEQ ID NO: 1726 - protein, 9 aa, Homo sapiens
FLDHIIASV

SEQ ID NO: 1727 - protein, 9 aa, Homo sapiens
FLDIHNIHV

SEQ ID NO: 1728 - protein, 9 aa, Homo sapiens
FLDITNPKA

SEQ ID NO: 1729 - protein, 9 aa, Homo sapiens
FLDKNDHSL

SEQ ID NO: 1730 - protein, 9 aa, Homo sapiens
FLDKQGFYV

SEQ ID NO: 1731 - protein, 9 aa, Homo sapiens
FLDNERHEV

SEQ ID NO: 1732 - protein, 11 aa, Homo sapiens
FLDPGGPMMKL

SEQ ID NO: 1733 - protein, 10 aa, Homo sapiens
FLDPNNIPKA

SEQ ID NO: 1734 - protein, 9 aa, Homo sapiens
FLDPRPLTV

SEQ ID NO: 1735 - protein, 10 aa, Homo sapiens
FLDPRPLTVV

SEQ ID NO: 1736 - protein, 9 aa, Homo sapiens
FLDQHGHNL

SEQ ID NO: 1737 - protein, 10 aa, Homo sapiens
FLDSGTIRGV

SEQ ID NO: 1738 - protein, 9 aa, Homo sapiens
FLDVNSHKI

SEQ ID NO: 1739 - protein, 9 aa, Homo sapiens
FLEEKIPSI

SEQ ID NO: 1740 - protein, 9 aa, Homo sapiens
FLEPVNPRL

SEQ ID NO: 1741 - protein, 9 aa, Homo sapiens
FLFDRPMHV

SEQ ID NO: 1742 - protein, 9 aa, Homo sapiens
FLFEPVVKA

SEQ ID NO: 1743 - protein, 9 aa, Homo sapiens
FLFNKVVNL

SEQ ID NO: 1744 - protein, 9 aa, Homo sapiens
FLFQEPRSI

SEQ ID NO: 1745 - protein, 9 aa, Homo sapiens
FLGEINDRL

SEQ ID NO: 1746 - protein, 9 aa, Homo sapiens
FLGEKIASV

SEQ ID NO: 1747 - protein, 9 aa, Homo sapiens
FLGSFIDHV

SEQ ID NO: 1748 - protein, 11 aa, Homo sapiens
FLHDDNMNFRV

SEQ ID NO: 1749 - protein, 9 aa, Homo sapiens
FLHDHQAEL

SEQ ID NO: 1750 - protein, 9 aa, Homo sapiens
FLHSLNIEM

SEQ ID NO: 1751 - protein, 10 aa, Homo sapiens
FLIEEQKIVV

SEQ ID NO: 1752 - protein, 10 aa, Homo sapiens
FLIEGTISRA

SEQ ID NO: 1753 - protein, 11 aa, Homo sapiens
FLIEPEHVNTV

SEQ ID NO: 1754 - protein, 10 aa, Homo sapiens
FLIGPKLYEA

SEQ ID NO: 1755 - protein, 9 aa, Homo sapiens
FLKEHMDEV

SEQ ID NO: 1756 - protein, 9 aa, Homo sapiens
FLLDKKIGV

SEQ ID NO: 1757 - protein, 11 aa, Homo sapiens
FLLDPVKGERL

SEQ ID NO: 1758 - protein, 9 aa, Homo sapiens
FLLEGIRSL

SEQ ID NO: 1759 - protein, 9 aa, Homo sapiens
FLLEKGYEV

SEQ ID NO: 1760 - protein, 9 aa, Homo sapiens
FLLEKPFSV

SEQ ID NO: 1761 - protein, 9 aa, Homo sapiens
FLLEKSRVV

SEQ ID NO: 1762 - protein, 9 aa, Homo sapiens
FLLENSSKV

SEQ ID NO: 1763 - protein, 9 aa, Homo sapiens
FLLETVVRV

SEQ ID NO: 1764 - protein, 9 aa, Homo sapiens
FLLGKEVSL

SEQ ID NO: 1765 - protein, 11 aa, Homo sapiens
FLLGPEGQHLL

SEQ ID NO: 1766 - protein, 10 aa, Homo sapiens
FLLGSVVHEV

SEQ ID NO: 1767 - protein, 9 aa, Homo sapiens
FLLHIQQQV

SEQ ID NO: 1768 - protein, 10 aa, Homo sapiens
FLLPHPGLKV

SEQ ID NO: 1769 - protein, 10 aa, Homo sapiens
FLLPIKTVGV

SEQ ID NO: 1770 - protein, 9 aa, Homo sapiens
FLLPKVQSI

SEQ ID NO: 1771 - protein, 9 aa, Homo sapiens
FLLQHQTFL

SEQ ID NO: 1772 - protein, 9 aa, Homo sapiens
FLLQHVQEL

SEQ ID NO: 1773 - protein, 9 aa, Homo sapiens
FLMDFIHQV

SEQ ID NO: 1774 - protein, 9 aa, Homo sapiens
FLMEEVHMI

SEQ ID NO: 1775 - protein, 11 aa, Homo sapiens
FLMKNSDLYGA

SEQ ID NO: 1776 - protein, 9 aa, Homo sapiens
FLMNEVIKL

SEQ ID NO: 1777 - protein, 9 aa, Homo sapiens
FLNGEVIRL

SEQ ID NO: 1778 - protein, 9 aa, Homo sapiens
FLNKEITSV

SEQ ID NO: 1779 - protein, 9 aa, Homo sapiens
FLNKMKIMV

SEQ ID NO: 1780 - protein, 11 aa, Homo sapiens
FLPETRIMTSV

SEQ ID NO: 1781 - protein, 9 aa, Homo sapiens
FLPRKFPSL

SEQ ID NO: 1782 - protein, 9 aa, Homo sapiens
FLQEHNTTL

SEQ ID NO: 1783 - protein, 9 aa, Homo sapiens
FLQEKLQEI

SEQ ID NO: 1784 - protein, 9 aa, Homo sapiens
FLQEKSPAV

SEQ ID NO: 1785 - protein, 10 aa, Homo sapiens
FLQENTHVRL

SEQ ID NO: 1786 - protein, 9 aa, Homo sapiens
FLQEYTVKL

SEQ ID NO: 1787 - protein, 9 aa, Homo sapiens
FLQLAVDKV

SEQ ID NO: 1788 - protein, 9 aa, Homo sapiens
FLQPELVKL

SEQ ID NO: 1789 - protein, 9 aa, Homo sapiens
FLQPHLDAV

SEQ ID NO: 1790 - protein, 9 aa, Homo sapiens
FLREYFERL

SEQ ID NO: 1791 - protein, 11 aa, Homo sapiens
FLSEEGGHVAV

SEQ ID NO: 1792 - protein, 10 aa, Homo sapiens
FLSEHPNVTL

SEQ ID NO: 1793 - protein, 11 aa, Homo sapiens
FLTDSNNIKEV

SEQ ID NO: 1794 - protein, 9 aa, Homo sapiens
FLTKQEILL

SEQ ID NO: 1795 - protein, 10 aa, Homo sapiens
FLVDGPRVQL

SEQ ID NO: 1796 - protein, 9 aa, Homo sapiens
FLVEHNLVL

SEQ ID NO: 1797 - protein, 9 aa, Homo sapiens
FLVEHVLTL

SEQ ID NO: 1798 - protein, 9 aa, Homo sapiens
FLWPKEVEL

SEQ ID NO: 1799 - protein, 9 aa, Homo sapiens
FLYAGHIFL

SEQ ID NO: 1800 - protein, 9 aa, Homo sapiens
FLYDDNQRV

SEQ ID NO: 1801 - protein, 9 aa, Homo sapiens
FLYDTHQNL

SEQ ID NO: 1802 - protein, 9 aa, Homo sapiens
FLYFEDHGL

SEQ ID NO: 1803 - protein, 10 aa, Homo sapiens
FLYQRLVVGA

SEQ ID NO: 1804 - protein, 10 aa, Homo sapiens
FMDPQKMPYL

SEQ ID NO: 1805 - protein, 10 aa, Homo sapiens
FMFDEKLVTV

SEQ ID NO: 1806 - protein, 9 aa, Homo sapiens
FMFGQKLNV

SEQ ID NO: 1807 - protein, 11 aa, Homo sapiens
FMIDASVHPTL

SEQ ID NO: 1808 - protein, 11 aa, Homo sapiens
FMLETVDSVKL

SEQ ID NO: 1809 - protein, 9 aa, Homo sapiens
FMMPRIVNV

SEQ ID NO: 1810 - protein, 9 aa, Homo sapiens
FMNDAIEKA

SEQ ID NO: 1811 - protein, 9 aa, Homo sapiens
FMVDRLESL

SEQ ID NO: 1812 - protein, 11 aa, Homo sapiens
FTFNIKDIHSV

SEQ ID NO: 1813 - protein, 9 aa, Homo sapiens
FVDERPEEV

SEQ ID NO: 1814 - protein, 9 aa, Homo sapiens
FVDGLTFKV

SEQ ID NO: 1815 - protein, 9 aa, Herpes simplex virus (type 1 / strain 17)
FVLATGDFV

SEQ ID NO: 1816 - protein, 10 aa, Homo sapiens
FVMEGEPPKL

SEQ ID NO: 1817 - protein, 9 aa, Herpes simplex virus (type 1 / strain 17)
GIFEDRAPV

SEQ ID NO: 1818 - protein, 10 aa, Homo sapiens
GIFGGHIRSV

SEQ ID NO: 1819 - protein, 9 aa, Homo sapiens
GILSHINTV

SEQ ID NO: 1820 - protein, 11 aa, Homo sapiens
GILTKELLHSV

SEQ ID NO: 1821 - protein, 9 aa, Homo sapiens
GLADKVYFL

SEQ ID NO: 1822 - protein, 11 aa, Homo sapiens
GLADNTVIAKV

SEQ ID NO: 1823 - protein, 9 aa, Homo sapiens
GLAPHLEQI

SEQ ID NO: 1824 - protein, 9 aa, Homo sapiens
GLAPLEVRV

SEQ ID NO: 1825 - protein, 10 aa, Homo sapiens
GLDDIKDLKV

SEQ ID NO: 1826 - protein, 9 aa, Homo sapiens
GLDHYVYKV

SEQ ID NO: 1827 - protein, 10 aa, Homo sapiens
GLDIDGIYRV

SEQ ID NO: 1828 - protein, 10 aa, Homo sapiens
GLDPNKPPEL

SEQ ID NO: 1829 - protein, 11 aa, Homo sapiens
GLDPQGDRSFL

SEQ ID NO: 1830 - protein, 10 aa, Homo sapiens
GLDPSGARLV

SEQ ID NO: 1831 - protein, 9 aa, Homo sapiens
GLDRLNVTV

SEQ ID NO: 1832 - protein, 9 aa, Homo sapiens
GLDRNAPSV

SEQ ID NO: 1833 - protein, 10 aa, Homo sapiens
GLDVDGIYRV

SEQ ID NO: 1834 - protein, 9 aa, Homo sapiens
GLFDQHFRL

SEQ ID NO: 1835 - protein, 9 aa, Homo sapiens
GLFQGKTPL

SEQ ID NO: 1836 - protein, 10 aa, Homo sapiens
GLFSNDIPHV

SEQ ID NO: 1837 - protein, 9 aa, Homo sapiens
GLGPPGRSV

SEQ ID NO: 1838 - protein, 8 aa, Homo sapiens
GLGPTFKL

SEQ ID NO: 1839 - protein, 9 aa, Homo sapiens
GLHFVVPSV

SEQ ID NO: 1840 - protein, 9 aa, Homo sapiens
GLIDRQVTV

SEQ ID NO: 1841 - protein, 10 aa, Homo sapiens
GLIDVKPLGV

SEQ ID NO: 1842 - protein, 9 aa, Homo sapiens
GLIEILKKV

SEQ ID NO: 1843 - protein, 11 aa, Homo sapiens
GLLAGDRLVEV

SEQ ID NO: 1844 - protein, 9 aa, Homo sapiens
GLLENIPRV

SEQ ID NO: 1845 - protein, 10 aa, Homo sapiens
GLLETTVQKV

SEQ ID NO: 1846 - protein, 10 aa, Homo sapiens
GLLREQVAQL

SEQ ID NO: 1847 - protein, 11 aa, Homo sapiens
GLMDEKLLHNV

SEQ ID NO: 1848 - protein, 9 aa, Homo sapiens
GLMDNEIKV

SEQ ID NO: 1849 - protein, 9 aa, Homo sapiens
GLMDTVKKV

SEQ ID NO: 1850 - protein, 10 aa, Homo sapiens
GLMGAGIAQV

SEQ ID NO: 1851 - protein, 9 aa, Homo sapiens
GLMKKAYEL

SEQ ID NO: 1852 - protein, 9 aa, Homo sapiens
GLMKYIGEV

SEQ ID NO: 1853 - protein, 9 aa, Homo sapiens
GLMQEKIYI

SEQ ID NO: 1854 - protein, 9 aa, Homo sapiens
GLNEEIARV

SEQ ID NO: 1855 - protein, 10 aa, Homo sapiens
GLPRFGIEMV

SEQ ID NO: 1856 - protein, 9 aa, Homo sapiens
GLQEGTHEL

SEQ ID NO: 1857 - protein, 11 aa, Homo sapiens
GLRRVDDFKKA

SEQ ID NO: 1858 - protein, 9 aa, Homo sapiens
GLSNHIAAL

SEQ ID NO: 1859 - protein, 10 aa, Homo sapiens
GLSTEGIYRV

SEQ ID NO: 1860 - protein, 10 aa, Homo sapiens
GLTGQRLLGV

SEQ ID NO: 1861 - protein, 9 aa, Homo sapiens
GLVDKLQAL

SEQ ID NO: 1862 - protein, 9 aa, Homo sapiens
GLVGALMHV

SEQ ID NO: 1863 - protein, 9 aa, Homo sapiens
GLVGSLQEV

SEQ ID NO: 1864 - protein, 11 aa, Homo sapiens
GLWEDGRSTLL

SEQ ID NO: 1865 - protein, 9 aa, Homo sapiens
GLWEEAYRV

SEQ ID NO: 1866 - protein, 11 aa, Homo sapiens
GLWGPEEEPHL

SEQ ID NO: 1867 - protein, 9 aa, Homo sapiens
GLWGPVHEL

SEQ ID NO: 1868 - protein, 10 aa, Homo sapiens
GLWSGPLPRV

SEQ ID NO: 1869 - protein, 10 aa, Homo sapiens
GLYDGPVHEV

SEQ ID NO: 1870 - protein, 11 aa, Homo sapiens
GLYDSQNPPTV

SEQ ID NO: 1871 - protein, 10 aa, Homo sapiens
GLYEFPLNKV

SEQ ID NO: 1872 - protein, 9 aa, Homo sapiens
GMAERIPEL

SEQ ID NO: 1873 - protein, 11 aa, Homo sapiens
GMYGKIAVMEL

SEQ ID NO: 1874 - protein, 9 aa, Homo sapiens
GMYIFLHTV

SEQ ID NO: 1875 - protein, 11 aa, Homo sapiens
GVAESIHLWEV

SEQ ID NO: 1876 - protein, 11 aa, Homo sapiens
GVAGGSILKGV

SEQ ID NO: 1877 - protein, 9 aa, Homo sapiens
HLAEALHQA

SEQ ID NO: 1878 - protein, 9 aa, Homo sapiens
HLAEVLERV

SEQ ID NO: 1879 - protein, 9 aa, Homo sapiens
HLAIKLEQV

SEQ ID NO: 1880 - protein, 9 aa, Homo sapiens
HLANIVERV

SEQ ID NO: 1881 - protein, 10 aa, Homo sapiens
HLAVKVANQA

SEQ ID NO: 1882 - protein, 9 aa, Homo sapiens
HLDATKLLL

SEQ ID NO: 1883 - protein, 10 aa, Homo sapiens
HLDPTEMEKV

SEQ ID NO: 1884 - protein, 10 aa, Homo sapiens
HLFDLTPAKV

SEQ ID NO: 1885 - protein, 10 aa, Homo sapiens
HLIDTNKIQL

SEQ ID NO: 1886 - protein, 9 aa, Homo sapiens
HLIHAPPEV

SEQ ID NO: 1887 - protein, 9 aa, Homo sapiens
HLLEHSVEL

SEQ ID NO: 1888 - protein, 9 aa, Homo sapiens
HLLERVDQV

SEQ ID NO: 1889 - protein, 9 aa, Homo sapiens
HLLSKLISV

SEQ ID NO: 1890 - protein, 12 aa, Homo sapiens
HLMEIQVNGGTV

SEQ ID NO: 1891 - protein, 9 aa, Homo sapiens
HLSELNTKL

SEQ ID NO: 1892 - protein, 9 aa, Homo sapiens
HLTDITLKV

SEQ ID NO: 1893 - protein, 9 aa, Homo sapiens
HLWRGIVSI

SEQ ID NO: 1894 - protein, 9 aa, Homo sapiens
HLYARQLTL

SEQ ID NO: 1895 - protein, 9 aa, Homo sapiens
HLYDIHVTV

SEQ ID NO: 1896 - protein, 9 aa, Homo sapiens
HLYSEVKEV

SEQ ID NO: 1897 - protein, 10 aa, Homo sapiens
IAAQDLLLAV

SEQ ID NO: 1898 - protein, 10 aa, Homo sapiens
IALNEKLVNL

SEQ ID NO: 1899 - protein, 10 aa, Homo sapiens
IIADMDKWTV

SEQ ID NO: 1900 - protein, 10 aa, Homo sapiens
IIAVSLAVNL

SEQ ID NO: 1901 - protein, 11 aa, Homo sapiens
IILEEGKEILV

SEQ ID NO: 1902 - protein, 9 aa, Homo sapiens
IINFSLLLV

SEQ ID NO: 1903 - protein, 9 aa, Homo sapiens
ILAAHVPTL

SEQ ID NO: 1904 - protein, 9 aa, Homo sapiens
ILAAVETRL

SEQ ID NO: 1905 - protein, 9 aa, Homo sapiens
ILAPVVKEI

SEQ ID NO: 1906 - protein, 9 aa, Homo sapiens
ILDAGGHNV

SEQ ID NO: 1907 - protein, 11 aa, Homo sapiens
ILDAGGHNVTI

SEQ ID NO: 1908 - protein, 9 aa, Homo sapiens
ILDDSPKEI

SEQ ID NO: 1909 - protein, 11 aa, Homo sapiens
ILDDTAKNLRV

SEQ ID NO: 1910 - protein, 9 aa, Homo sapiens
ILDEAIYKV

SEQ ID NO: 1911 - protein, 9 aa, Homo sapiens
ILDEHVQRV

SEQ ID NO: 1912 - protein, 11 aa, Homo sapiens
ILDEMSHKLRL

SEQ ID NO: 1913 - protein, 9 aa, Homo sapiens
ILDGNQLHI

SEQ ID NO: 1914 - protein, 9 aa, Homo sapiens
ILDISEHTL

SEQ ID NO: 1915 - protein, 9 aa, Homo sapiens
ILDKIVQKV

SEQ ID NO: 1916 - protein, 9 aa, Homo sapiens
ILDSGIYRI

SEQ ID NO: 1917 - protein, 10 aa, Homo sapiens
ILDSRGNPTV

SEQ ID NO: 1918 - protein, 9 aa, Homo sapiens
RLFENYIEL

SEQ ID NO: 1919 - protein, 9 aa, Human rotavirus
SLISGMWLL

SEQ ID NO: 1920 - protein, 10 aa, Homo sapiens
ILEEGKEILV

SEQ ID NO: 1921 - protein, 9 aa, Homo sapiens
ILEKKVEKV

SEQ ID NO: 1922 - protein, 9 aa, Homo sapiens
ILFGHENRV

SEQ ID NO: 1923 - protein, 9 aa, Homo sapiens
ILFNRVLGV

SEQ ID NO: 1924 - protein, 10 aa, Homo sapiens
ILGDRFSWNV

SEQ ID NO: 1925 - protein, 9 aa, Homo sapiens
ILHDDEVTV

SEQ ID NO: 1926 - protein, 9 aa, Homo sapiens
ILHDRLYYL

SEQ ID NO: 1927 - protein, 9 aa, Homo sapiens
ILHHKVYDL

SEQ ID NO: 1928 - protein, 11 aa, Homo sapiens
ILIEKEYLERV

SEQ ID NO: 1929 - protein, 11 aa, Homo sapiens
ILINDAGEVRL

SEQ ID NO: 1930 - protein, 9 aa, Homo sapiens
ILIRPLVSV

SEQ ID NO: 1931 - protein, 11 aa, Homo sapiens
ILLDDHGHIRI

SEQ ID NO: 1932 - protein, 11 aa, Homo sapiens
ILLDERGQIKL

SEQ ID NO: 1933 - protein, 10 aa, Homo sapiens
ILLDNDHYAM

SEQ ID NO: 1934 - protein, 9 aa, Homo sapiens
ILLDQTVRV

SEQ ID NO: 1935 - protein, 9 aa, Homo sapiens
ILLEHNYAL

SEQ ID NO: 1936 - protein, 11 aa, Homo sapiens
ILLNNSGQIKL

SEQ ID NO: 1937 - protein, 10 aa, Homo sapiens
ILLPDNVHYV

SEQ ID NO: 1938 - protein, 11 aa, Homo sapiens
ILLPEPSIRSV

SEQ ID NO: 1939 - protein, 9 aa, Homo sapiens
ILLPYVSKV

SEQ ID NO: 1940 - protein, 9 aa, Homo sapiens
ILLQGRLYL

SEQ ID NO: 1941 - protein, 9 aa, Homo sapiens
ILLRDLPTL

SEQ ID NO: 1942 - protein, 11 aa, Homo sapiens
ILLSEPGLVKL

SEQ ID NO: 1943 - protein, 11 aa, Homo sapiens
ILMEHIHKLKA

SEQ ID NO: 1944 - protein, 9 aa, Homo sapiens
ILMGVLKEV

SEQ ID NO: 1945 - protein, 9 aa, Homo sapiens
ILMHHPPQV

SEQ ID NO: 1946 - protein, 9 aa, Homo sapiens
ILMIFSHQI

SEQ ID NO: 1947 - protein, 9 aa, Homo sapiens
ILNKQEFFV

SEQ ID NO: 1948 - protein, 9 aa, Homo sapiens
ILNNKIPEA

SEQ ID NO: 1949 - protein, 9 aa, Homo sapiens
ILQDRLNQV

SEQ ID NO: 1950 - protein, 9 aa, Homo sapiens
ILQEKLQEI

SEQ ID NO: 1951 - protein, 9 aa, Homo sapiens
ILQEREYRL

SEQ ID NO: 1952 - protein, 9 aa, Homo sapiens
ILQNKIDLV

SEQ ID NO: 1953 - protein, 9 aa, Homo sapiens
ILQQHIATV

SEQ ID NO: 1954 - protein, 10 aa, Homo sapiens
ILQSTRLPLI

SEQ ID NO: 1955 - protein, 9 aa, Homo sapiens
ILSEVQQAV

SEQ ID NO: 1956 - protein, 9 aa, Homo sapiens
ILSGVIRSV

SEQ ID NO: 1957 - protein, 9 aa, Homo sapiens
ILTEAIKAA

SEQ ID NO: 1958 - protein, 9 aa, Homo sapiens
ILTESEIKL

SEQ ID NO: 1959 - protein, 9 aa, Homo sapiens
ILTNVVPKM

SEQ ID NO: 1960 - protein, 11 aa, Homo sapiens
ILWDLDHLTHV

SEQ ID NO: 1961 - protein, 9 aa, Homo sapiens
ILYDKLEKI

SEQ ID NO: 1962 - protein, 10 aa, Homo sapiens
ILYEHQLGQA

SEQ ID NO: 1963 - protein, 9 aa, Homo sapiens
ILYGEVEKL

SEQ ID NO: 1964 - protein, 9 aa, Homo sapiens
ILYGKIIHL

SEQ ID NO: 1965 - protein, 11 aa, Homo sapiens
IMAQLPQEQKA

SEQ ID NO: 1966 - protein, 9 aa, Homo sapiens
IMDDKSLNI

SEQ ID NO: 1967 - protein, 11 aa, Homo sapiens
IMLSEKHLISV

SEQ ID NO: 1968 - protein, 8 aa, Homo sapiens
IQDITQRL

SEQ ID NO: 1969 - protein, 9 aa, Homo sapiens
ITAKQLETL

SEQ ID NO: 1970 - protein, 9 aa, Homo sapiens
ITDDLHFYV

SEQ ID NO: 1971 - protein, 9 aa, Homo sapiens
IVDKTASFV

SEQ ID NO: 1972 - protein, 11 aa, Homo sapiens
IVLPAGALHQV

SEQ ID NO: 1973 - protein, 9 aa, Homo sapiens
IVMEHVVFL

SEQ ID NO: 1974 - protein, 9 aa, Homo sapiens
KIADFGWSV

SEQ ID NO: 1975 - protein, 10 aa, Homo sapiens
KIFDEILVNA

SEQ ID NO: 1976 - protein, 10 aa, Homo sapiens
KIFSGVFVKV

SEQ ID NO: 1977 - protein, 10 aa, Homo sapiens
KIFTEDLPEV

SEQ ID NO: 1978 - protein, 10 aa, Homo sapiens
KIGDFGLATV

SEQ ID NO: 1979 - protein, 9 aa, Homo sapiens
KIIDFIYTA

SEQ ID NO: 1980 - protein, 9 aa, Homo sapiens
KILDLETQL

SEQ ID NO: 1981 - protein, 9 aa, Homo sapiens
KILDYEVTL

SEQ ID NO: 1982 - protein, 9 aa, Homo sapiens
KILEDVVGV

SEQ ID NO: 1983 - protein, 9 aa, Homo sapiens
KILEELQKV

SEQ ID NO: 1984 - protein, 11 aa, Homo sapiens
KILNGKGILPT

SEQ ID NO: 1985 - protein, 9 aa, Homo sapiens
KILQELPSV

SEQ ID NO: 1986 - protein, 9 aa, Homo sapiens
KILSELFTV

SEQ ID NO: 1987 - protein, 9 aa, Homo sapiens
KIMDQVQQA

SEQ ID NO: 1988 - protein, 9 aa, Homo sapiens
KIMEKIRNV

SEQ ID NO: 1989 - protein, 9 aa, Homo sapiens
KIMESLPQI

SEQ ID NO: 1990 - protein, 11 aa, Homo sapiens
KIMTEKELLAV

SEQ ID NO: 1991 - protein, 9 aa, Homo sapiens
KLAAAISEV

SEQ ID NO: 1992 - protein, 11 aa, Homo sapiens
KLADDVDLEQV

SEQ ID NO: 1993 - protein, 11 aa, Homo sapiens
KLADFGDAVQL

SEQ ID NO: 1994 - protein, 10 aa, Toxoplasma gondii ME49
KLADFGLARA

SEQ ID NO: 1995 - protein, 10 aa, Homo sapiens
KLADISINYV

SEQ ID NO: 1996 - protein, 9 aa, Homo sapiens
KLADKLYNL

SEQ ID NO: 1997 - protein, 9 aa, Homo sapiens
KLAEGVLDV

SEQ ID NO: 1998 - protein, 9 aa, Homo sapiens
KLAEIVKQV

SEQ ID NO: 1999 - protein, 9 aa, Homo sapiens
KLAEKLTIL

SEQ ID NO: 2000 - protein, 10 aa, Homo sapiens
KLAENIDAQL

SEQ ID NO: 2001 - protein, 9 aa, Homo sapiens
KLAESVEKA

SEQ ID NO: 2002 - protein, 9 aa, Homo sapiens
KLAKLQAQV

SEQ ID NO: 2003 - protein, 10 aa, Homo sapiens
KLDDKDLPSV

SEQ ID NO: 2004 - protein, 11 aa, Homo sapiens
KLDDLTQDLTV

SEQ ID NO: 2005 - protein, 9 aa, Homo sapiens
KLDEHIAYL

SEQ ID NO: 2006 - protein, 11 aa, Homo sapiens
KLDETGNSLKV

SEQ ID NO: 2007 - protein, 11 aa, Homo sapiens
KLDPATSAVTV

SEQ ID NO: 2008 - protein, 9 aa, Homo sapiens
KLDQVIIHV

SEQ ID NO: 2009 - protein, 9 aa, Homo sapiens
KLFDRPQEL

SEQ ID NO: 2010 - protein, 11 aa, Homo sapiens
KLFDRPQELKL

SEQ ID NO: 2011 - protein, 9 aa, Homo sapiens
KLFEDELTL

SEQ ID NO: 2012 - protein, 9 aa, Homo sapiens
KLFEKVKEV

SEQ ID NO: 2013 - protein, 9 aa, Homo sapiens
KLFGHLTSA

SEQ ID NO: 2014 - protein, 9 aa, Homo sapiens
KLFSELPLA

SEQ ID NO: 2015 - protein, 9 aa, Homo sapiens
KLGELTMQL

SEQ ID NO: 2016 - protein, 11 aa, Homo sapiens
KLGHTDILVGV

SEQ ID NO: 2017 - protein, 9 aa, Homo sapiens
KLGLKPLEV

SEQ ID NO: 2018 - protein, 9 aa, Homo sapiens
KLHDINAQL

SEQ ID NO: 2019 - protein, 10 aa, Homo sapiens
KLHDVELHQV

SEQ ID NO: 2020 - protein, 9 aa, Homo sapiens
KLHGVNINV

SEQ ID NO: 2021 - protein, 10 aa, Homo sapiens
KLIDGQVIQL

SEQ ID NO: 2022 - protein, 9 aa, Homo sapiens
KLIEELETL

SEQ ID NO: 2023 - protein, 10 aa, Homo sapiens
KLIEKLDIKL

SEQ ID NO: 2024 - protein, 9 aa, Homo sapiens
KLILLITQV

SEQ ID NO: 2025 - protein, 9 aa, Homo sapiens
KLIPFLEKL

SEQ ID NO: 2026 - protein, 9 aa, Homo sapiens
KLIPQLPTL

SEQ ID NO: 2027 - protein, 9 aa, Homo sapiens
KLIQNVFEI

SEQ ID NO: 2028 - protein, 9 aa, Homo sapiens
KLLAVIHEL

SEQ ID NO: 2029 - protein, 9 aa, Homo sapiens
KLLDIRSYL

SEQ ID NO: 2030 - protein, 11 aa, Homo sapiens
KLLDISELDMV

SEQ ID NO: 2031 - protein, 9 aa, Homo sapiens
KLLDLMPRL

SEQ ID NO: 2032 - protein, 9 aa, Homo sapiens
KLLDLQVRV

SEQ ID NO: 2033 - protein, 11 aa, Homo sapiens
KLLDLSDSTSV

SEQ ID NO: 2034 - protein, 9 aa, Homo sapiens
KLLDQMPSL

SEQ ID NO: 2035 - protein, 9 aa, Homo sapiens
KLLDVVHPA

SEQ ID NO: 2036 - protein, 9 aa, Homo sapiens
KLLEATSAV

SEQ ID NO: 2037 - protein, 10 aa, Homo sapiens
KLLEEQGIFL

SEQ ID NO: 2038 - protein, 10 aa, Homo sapiens
KLLEIDIDGV

SEQ ID NO: 2039 - protein, 9 aa, Homo sapiens
KLLEKAFSI

SEQ ID NO: 2040 - protein, 12 aa, Homo sapiens
KLLELDPEHQRA

SEQ ID NO: 2041 - protein, 11 aa, Homo sapiens
KLLELEKHIRV

SEQ ID NO: 2042 - protein, 10 aa, Homo sapiens
KLLEPVPVSV

SEQ ID NO: 2043 - protein, 9 aa, Homo sapiens
KLLERLPEA

SEQ ID NO: 2044 - protein, 9 aa, Homo sapiens
KLLERVSAI

SEQ ID NO: 2045 - protein, 9 aa, Homo sapiens
KLLEVQPQV

SEQ ID NO: 2046 - protein, 9 aa, Homo sapiens
KLLEVYEQL

SEQ ID NO: 2047 - protein, 9 aa, Homo sapiens
KLLEYIEEI

SEQ ID NO: 2048 - protein, 9 aa, Homo sapiens
KLLGYDVHV

SEQ ID NO: 2049 - protein, 9 aa, Homo sapiens
KLLKDLPEL

SEQ ID NO: 2050 - protein, 9 aa, Homo sapiens
KLLTEVHAA

SEQ ID NO: 2051 - protein, 9 aa, Homo sapiens
KLMDEVAGI

SEQ ID NO: 2052 - protein, 9 aa, Homo sapiens
KLMDHIYAV

SEQ ID NO: 2053 - protein, 9 aa, Homo sapiens
KLMDKVVRL

SEQ ID NO: 2054 - protein, 10 aa, Homo sapiens
KLMDLDVEQL

SEQ ID NO: 2055 - protein, 9 aa, Homo sapiens
KLMDQLEAL

SEQ ID NO: 2056 - protein, 9 aa, Homo sapiens
KLNPQQFEV

SEQ ID NO: 2057 - protein, 9 aa, Homo sapiens
KLPEKWESV

SEQ ID NO: 2058 - protein, 9 aa, Homo sapiens
KLPPPPPQA

SEQ ID NO: 2059 - protein, 9 aa, Homo sapiens
KLQDQIFNL

SEQ ID NO: 2060 - protein, 9 aa, Homo sapiens
KLQELENRL

SEQ ID NO: 2061 - protein, 9 aa, Homo sapiens
KLQELNYNL

SEQ ID NO: 2062 - protein, 9 aa, Homo sapiens
KLQEQIFHL

SEQ ID NO: 2063 - protein, 9 aa, Homo sapiens
KLSDLQTQL

SEQ ID NO: 2064 - protein, 9 aa, Homo sapiens
KLSEVLQAV

SEQ ID NO: 2065 - protein, 9 aa, Homo sapiens
KLVELPYTV

SEQ ID NO: 2066 - protein, 9 aa, Homo sapiens
KLVKEVIAV

SEQ ID NO: 2067 - protein, 9 aa, Homo sapiens
KLVMEIIKL

SEQ ID NO: 2068 - protein, 9 aa, Homo sapiens
KLWEAESKL

SEQ ID NO: 2069 - protein, 9 aa, Homo sapiens
KLWGQSIQL

SEQ ID NO: 2070 - protein, 9 aa, Homo sapiens
KLYDGFQYL

SEQ ID NO: 2071 - protein, 9 aa, Homo sapiens
KLYEEINQV

SEQ ID NO: 2072 - protein, 9 aa, Homo sapiens
KLYEQHHVV

SEQ ID NO: 2073 - protein, 11 aa, Homo sapiens
KLYGPEGLELV

SEQ ID NO: 2074 - protein, 10 aa, Homo sapiens
KLYPQLPAEI

SEQ ID NO: 2075 - protein, 9 aa, Homo sapiens
KLYQHEINL

SEQ ID NO: 2076 - protein, 9 aa, Homo sapiens
KLYQRDLEV

SEQ ID NO: 2077 - protein, 9 aa, Homo sapiens
KLYTGLREV

SEQ ID NO: 2078 - protein, 9 aa, Homo sapiens
KMAEMLVEL

SEQ ID NO: 2079 - protein, 11 aa, Homo sapiens
KMFDLNGDGEV

SEQ ID NO: 2080 - protein, 9 aa, Homo sapiens
KMLEKLPEL

SEQ ID NO: 2081 - protein, 9 aa, Homo sapiens
KMMDVTVTI

SEQ ID NO: 2082 - protein, 9 aa, Homo sapiens
KMSEKILLL

SEQ ID NO: 2083 - protein, 9 aa, Homo sapiens
KMWEEAISL

SEQ ID NO: 2084 - protein, 10 aa, Homo sapiens
KMYEEFLSKV

SEQ ID NO: 2085 - protein, 10 aa, Homo sapiens
KTVDGPSGKL

SEQ ID NO: 2086 - protein, 9 aa, Homo sapiens
KVANIIAEV

SEQ ID NO: 2087 - protein, 9 aa, Homo sapiens
KVLDFEHFL

SEQ ID NO: 2088 - protein, 9 aa, Homo sapiens
KVLEILHRV

SEQ ID NO: 2089 - protein, 11 aa, Homo sapiens
KVLEPSETLVV

SEQ ID NO: 2090 - protein, 9 aa, Homo sapiens
KVLERVNAV

SEQ ID NO: 2091 - protein, 9 aa, Homo sapiens
KVLGIVVGV

SEQ ID NO: 2092 - protein, 9 aa, Homo sapiens
KVMDEVEKA

SEQ ID NO: 2093 - protein, 9 aa, Homo sapiens
KVMELLVHL

SEQ ID NO: 2094 - protein, 12 aa, Homo sapiens
KVVLTQANKLGV

SEQ ID NO: 2095 - protein, 9 aa, Homo sapiens
LADETLLKV

SEQ ID NO: 2096 - protein, 11 aa, Homo sapiens
LIEECGGLEKI

SEQ ID NO: 2097 - protein, 8 aa, Homo sapiens
LIGQVHEV

SEQ ID NO: 2098 - protein, 11 aa, Homo sapiens
LIRGPAETEAT

SEQ ID NO: 2099 - protein, 9 aa, Homo sapiens
LLAAWTARA

SEQ ID NO: 2100 - protein, 9 aa, Homo sapiens
LLADLLHNV

SEQ ID NO: 2101 - protein, 9 aa, Homo sapiens
LLADRSWLL

SEQ ID NO: 2102 - protein, 9 aa, Homo sapiens
LLAEAKYYL

SEQ ID NO: 2103 - protein, 9 aa, Homo sapiens
LLAEKIYKI

SEQ ID NO: 2104 - protein, 9 aa, Homo sapiens
LLAETHYQL

SEQ ID NO: 2105 - protein, 11 aa, Homo sapiens
LLAILPEAARA

SEQ ID NO: 2106 - protein, 9 aa, Homo sapiens
LLAKEVQLV

SEQ ID NO: 2107 - protein, 9 aa, Homo sapiens
LLAPRPVAV

SEQ ID NO: 2108 - protein, 9 aa, Homo sapiens
LLDATQHTL

SEQ ID NO: 2109 - protein, 9 aa, Homo sapiens
LLDEEISRV

SEQ ID NO: 2110 - protein, 9 aa, Homo sapiens
LLDIIKSTV

SEQ ID NO: 2111 - protein, 8 aa, Homo sapiens
LLDKKIGV

SEQ ID NO: 2112 - protein, 11 aa, Homo sapiens
LLDPNVKSIFV

SEQ ID NO: 2113 - protein, 9 aa, Homo sapiens
LLDQTKTLA

SEQ ID NO: 2114 - protein, 9 aa, Homo sapiens
LLDRFLATV

SEQ ID NO: 2115 - protein, 9 aa, Homo sapiens
LLDSQSHHL

SEQ ID NO: 2116 - protein, 9 aa, Homo sapiens
LLDVTPKAV

SEQ ID NO: 2117 - protein, 9 aa, Homo sapiens
LLFDKFNAV

SEQ ID NO: 2118 - protein, 9 aa, Homo sapiens
LLFDRPMHV

SEQ ID NO: 2119 - protein, 10 aa, Homo sapiens
LLFEGEKITI

SEQ ID NO: 2120 - protein, 9 aa, Homo sapiens
LLFEGIARI

SEQ ID NO: 2121 - protein, 10 aa, Homo sapiens
LLFSGNIQEA

SEQ ID NO: 2122 - protein, 9 aa, Homo sapiens
LLGPPPVGV

SEQ ID NO: 2123 - protein, 8 aa, Homo sapiens
LLGRVYDV

SEQ ID NO: 2124 - protein, 11 aa, Homo sapiens
LLIASGANLLA

SEQ ID NO: 2125 - protein, 11 aa, Homo sapiens
LLIDDKGTIKL

SEQ ID NO: 2126 - protein, 9 aa, Human gammaherpesvirus 4
LLIEGIFFI

SEQ ID NO: 2127 - protein, 9 aa, Homo sapiens
LLIGHLERV

SEQ ID NO: 2128 - protein, 9 aa, Homo sapiens
LLIKQVVEV

SEQ ID NO: 2129 - protein, 10 aa, Homo sapiens
LLKVDVQGEI

SEQ ID NO: 2130 - protein, 9 aa, Homo sapiens
LLLDRIASV

SEQ ID NO: 2131 - protein, 9 aa, Homo sapiens
LLLGERVAL

SEQ ID NO: 2132 - protein, 9 aa, Homo sapiens
LLLGHVAQV

SEQ ID NO: 2133 - protein, 11 aa, Homo sapiens
LLLPEHVLVKI

SEQ ID NO: 2134 - protein, 12 aa, Homo sapiens
LLLPGELAKHAV

SEQ ID NO: 2135 - protein, 9 aa, Homo sapiens
LLLQHSPAL

SEQ ID NO: 2136 - protein, 9 aa, Homo sapiens
LLMDRVDEM

SEQ ID NO: 2137 - protein, 9 aa, Homo sapiens
LLMEHIFKL

SEQ ID NO: 2138 - protein, 9 aa, Homo sapiens
LLMEHIQEI

SEQ ID NO: 2139 - protein, 9 aa, Homo sapiens
LLNDRIWLA

SEQ ID NO: 2140 - protein, 9 aa, Homo sapiens
LLNSEVHML

SEQ ID NO: 2141 - protein, 9 aa, Homo sapiens
LLQDAIREV

SEQ ID NO: 2142 - protein, 9 aa, Homo sapiens
LLQDKQFEL

SEQ ID NO: 2143 - protein, 9 aa, Homo sapiens
LLQEVEHQL

SEQ ID NO: 2144 - protein, 9 aa, Homo sapiens
LLQPHLERV

SEQ ID NO: 2145 - protein, 9 aa, Homo sapiens
LLQRKVEEV

SEQ ID NO: 2146 - protein, 9 aa, Herpes simplex virus (type 1 / strain 17)
LLTTPKFTV

SEQ ID NO: 2147 - protein, 9 aa, Homo sapiens
LLVDVEPKV

SEQ ID NO: 2148 - protein, 12 aa, Homo sapiens
LLVGCTECALLA

SEQ ID NO: 2149 - protein, 10 aa, Homo sapiens
LLYDGKLSSA

SEQ ID NO: 2150 - protein, 11 aa, Homo sapiens
LLYDLADQLHA

SEQ ID NO: 2151 - protein, 9 aa, Homo sapiens
LLYEKGISL

SEQ ID NO: 2152 - protein, 10 aa, Homo sapiens
LLYQGPHNTL

SEQ ID NO: 2153 - protein, 10 aa, Homo sapiens
LMAEMGVHSV

SEQ ID NO: 2154 - protein, 9 aa, Homo sapiens
LMAHAMEEV

SEQ ID NO: 2155 - protein, 9 aa, Homo sapiens
LMIENLPKL

SEQ ID NO: 2156 - protein, 11 aa, Homo sapiens
LMLAGGQITGL

SEQ ID NO: 2157 - protein, 9 aa, Homo sapiens
LMQTEVHHV

SEQ ID NO: 2158 - protein, 9 aa, Homo sapiens
LMVDHVTEV

SEQ ID NO: 2159 - protein, 10 aa, Homo sapiens
LTAAQLLDTL

SEQ ID NO: 2160 - protein, 9 aa, Homo sapiens
LVIDVIHEV

SEQ ID NO: 2161 - protein, 9 aa, Homo sapiens
LVKGHAYSI

SEQ ID NO: 2162 - protein, 10 aa, Homo sapiens
LVQPRVEFIL

SEQ ID NO: 2163 - protein, 8 aa, Homo sapiens
LVRPGTAL

SEQ ID NO: 2164 - protein, 10 aa, Homo sapiens
LVRPGTALEL

SEQ ID NO: 2165 - protein, 10 aa, Homo sapiens
LVVRHQLLKT

SEQ ID NO: 2166 - protein, 9 aa, Homo sapiens
MAELKGYNL

SEQ ID NO: 2167 - protein, 9 aa, Homo sapiens
MLANDIARL

SEQ ID NO: 2168 - protein, 9 aa, Homo sapiens
MLATRVFSL

SEQ ID NO: 2169 - protein, 9 aa, Homo sapiens
MLFGHPLLV

SEQ ID NO: 2170 - protein, 9 aa, Homo sapiens
MLKEAHIEL

SEQ ID NO: 2171 - protein, 9 aa, Homo sapiens
MLLDTVQKV

SEQ ID NO: 2172 - protein, 9 aa, Homo sapiens
MLLEGLREL

SEQ ID NO: 2173 - protein, 9 aa, Homo sapiens
MLLEKLPQV

SEQ ID NO: 2174 - protein, 9 aa, Homo sapiens
MLNEHDFEV

SEQ ID NO: 2175 - protein, 9 aa, Homo sapiens
MLQDSIHVV

SEQ ID NO: 2176 - protein, 9 aa, Homo sapiens
MLQEKLKEL

SEQ ID NO: 2177 - protein, 10 aa, Homo sapiens
NILEKGGDPL

SEQ ID NO: 2178 - protein, 9 aa, Homo sapiens
NIVEKLREV

SEQ ID NO: 2179 - protein, 9 aa, Homo sapiens
NIVERVKEV

SEQ ID NO: 2180 - protein, 9 aa, Homo sapiens
NLAEKLIGV

SEQ ID NO: 2181 - protein, 9 aa, Homo sapiens
NLAEVVERV

SEQ ID NO: 2182 - protein, 9 aa, Homo sapiens
NLASRIPAA

SEQ ID NO: 2183 - protein, 9 aa, Homo sapiens
NLFNRYPAL

SEQ ID NO: 2184 - protein, 9 aa, Homo sapiens
NLLEIAPHL

SEQ ID NO: 2185 - protein, 9 aa, Homo sapiens
NLLSFTYKL

SEQ ID NO: 2186 - protein, 9 aa, Herpes simplex virus (type 1 / strain 17)
NLLTTPKFT

SEQ ID NO: 2187 - protein, 9 aa, Homo sapiens
NLMDDIERA

SEQ ID NO: 2188 - protein, 9 aa, Homo sapiens
NLVEKTPAL

SEQ ID NO: 2189 - protein, 12 aa, Homo sapiens
NMLGGKYQGTIL

SEQ ID NO: 2190 - protein, 9 aa, Homo sapiens
NMVDIIHSV

SEQ ID NO: 2191 - protein, 9 aa, Homo sapiens
NMYGKVVTV

SEQ ID NO: 2192 - protein, 10 aa, Homo sapiens
NQWDGTQHGV

SEQ ID NO: 2193 - protein, 9 aa, Homo sapiens
PLKQGGAKA

SEQ ID NO: 2194 - protein, 9 aa, Homo sapiens
QILENELQI

SEQ ID NO: 2195 - protein, 11 aa, Homo sapiens
QLAEDIEALKV

SEQ ID NO: 2196 - protein, 9 aa, Homo sapiens
QLDDLKVEL

SEQ ID NO: 2197 - protein, 9 aa, Homo sapiens
QLDSHVHAV

SEQ ID NO: 2198 - protein, 9 aa, Homo sapiens
QLIDIIHTA

SEQ ID NO: 2199 - protein, 9 aa, Homo sapiens
QLIDKVWQL

SEQ ID NO: 2200 - protein, 9 aa, Homo sapiens
QLLEKVIEL

SEQ ID NO: 2201 - protein, 9 aa, Homo sapiens
QLLQHVQAV

SEQ ID NO: 2202 - protein, 11 aa, Homo sapiens
QLQEGKNVIGL

SEQ ID NO: 2203 - protein, 9 aa, Homo sapiens
QLQGYLRSV

SEQ ID NO: 2204 - protein, 9 aa, Homo sapiens
QLTNVILHL

SEQ ID NO: 2205 - protein, 9 aa, Homo sapiens
QLVESLHKV

SEQ ID NO: 2206 - protein, 9 aa, Homo sapiens
QLVQRVASV

SEQ ID NO: 2207 - protein, 9 aa, Homo sapiens
QMISRIEYI

SEQ ID NO: 2208 - protein, 9 aa, Homo sapiens
QMLDVAIRV

SEQ ID NO: 2209 - protein, 11 aa, Homo sapiens
QMLEAIKALEV

SEQ ID NO: 2210 - protein, 9 aa, Bos taurus
RALPDFKGI

SEQ ID NO: 2211 - protein, 9 aa, Homo sapiens
RIIDVVYNA

SEQ ID NO: 2212 - protein, 11 aa, Homo sapiens
RLAEVGQYEQV

SEQ ID NO: 2213 - protein, 9 aa, Homo sapiens
RLAEVVHEL

SEQ ID NO: 2214 - protein, 11 aa, Homo sapiens
RLAGADVVLGV

SEQ ID NO: 2215 - protein, 9 aa, Homo sapiens
RLAQHITYV

SEQ ID NO: 2216 - protein, 9 aa, Homo sapiens
RLDDNIRTV

SEQ ID NO: 2217 - protein, 9 aa, Homo sapiens
RLFGILAHV

SEQ ID NO: 2218 - protein, 9 aa, Homo sapiens
RLFHYRITV

SEQ ID NO: 2219 - protein, 11 aa, Homo sapiens
RLFNHPNILRL

SEQ ID NO: 2220 - protein, 11 aa, Homo sapiens
RLGEAEGLMKV

SEQ ID NO: 2221 - protein, 9 aa, Homo sapiens
RLIDLHTNV

SEQ ID NO: 2222 - protein, 10 aa, Homo sapiens
RLLDEEISRV

SEQ ID NO: 2223 - protein, 9 aa, Homo sapiens
RLLDGAFKL

SEQ ID NO: 2224 - protein, 9 aa, Homo sapiens
RLLDSEIKI

SEQ ID NO: 2225 - protein, 9 aa, Homo sapiens
RLLDSVRAI

SEQ ID NO: 2226 - protein, 9 aa, Homo sapiens
RLLDYVVNI

SEQ ID NO: 2227 - protein, 11 aa, Homo sapiens
RLLEEGVLRQI

SEQ ID NO: 2228 - protein, 10 aa, Homo sapiens
RLLEGYEIYV

SEQ ID NO: 2229 - protein, 9 aa, Homo sapiens
RLLEIDPYL

SEQ ID NO: 2230 - protein, 9 aa, Homo sapiens
RLLEQKVEL

SEQ ID NO: 2231 - protein, 9 aa, Homo sapiens
RLLEQLQEI

SEQ ID NO: 2232 - protein, 9 aa, Homo sapiens
RLLEVVTSI

SEQ ID NO: 2233 - protein, 9 aa, Homo sapiens
RLLQEQHQL

SEQ ID NO: 2234 - protein, 9 aa, Homo sapiens
RLMGSILGV

SEQ ID NO: 2235 - protein, 10 aa, Homo sapiens
RLMNLPLHSV

SEQ ID NO: 2236 - protein, 9 aa, Homo sapiens
RLNEKNYEL

SEQ ID NO: 2237 - protein, 9 aa, Homo sapiens
RLQDAIAKV

SEQ ID NO: 2238 - protein, 10 aa, Homo sapiens
RLQEDPPAGV

SEQ ID NO: 2239 - protein, 10 aa, Homo sapiens
RLQEDPPVGV

SEQ ID NO: 2240 - protein, 9 aa, Homo sapiens
RLQEEINEV

SEQ ID NO: 2241 - protein, 9 aa, Homo sapiens
RLQESVMEA

SEQ ID NO: 2242 - protein, 9 aa, Homo sapiens
RLSDVQIYV

SEQ ID NO: 2243 - protein, 10 aa, Homo sapiens
RLSELGITQA

SEQ ID NO: 2244 - protein, 9 aa, Homo sapiens
RLTDYISKV

SEQ ID NO: 2245 - protein, 9 aa, Homo sapiens
RLTPKLMEV

SEQ ID NO: 2246 - protein, 9 aa, Homo sapiens
RLVEIQYEL

SEQ ID NO: 2247 - protein, 11 aa, Homo sapiens
RLVQGSILKKV

SEQ ID NO: 2248 - protein, 9 aa, Homo sapiens
RLWNETVEL

SEQ ID NO: 2249 - protein, 9 aa, Homo sapiens
RLYDGLFKV

SEQ ID NO: 2250 - protein, 12 aa, Homo sapiens
RLYDPASGTISL

SEQ ID NO: 2251 - protein, 9 aa, Homo sapiens
RMFDGKFVV

SEQ ID NO: 2252 - protein, 10 aa, Homo sapiens
RMFDGKFVVA

SEQ ID NO: 2253 - protein, 9 aa, Homo sapiens
RMLDSVEKL

SEQ ID NO: 2254 - protein, 12 aa, Homo sapiens
RVITEEEKNFKA

SEQ ID NO: 2255 - protein, 11 aa, Homo sapiens
RVLEVGALQAV

SEQ ID NO: 2256 - protein, 11 aa, Homo sapiens
RVLPPSALQSV

SEQ ID NO: 2257 - protein, 9 aa, Homo sapiens
RVPPPPQSV

SEQ ID NO: 2258 - protein, 11 aa, Homo sapiens
RVVGPISGADL

SEQ ID NO: 2259 - protein, 9 aa, Homo sapiens
SIIQRLLEV

SEQ ID NO: 2260 - protein, 9 aa, Homo sapiens
SILRHVAEV

SEQ ID NO: 2261 - protein, 9 aa, Homo sapiens
SLADLYFRA

SEQ ID NO: 2262 - protein, 9 aa, Homo sapiens
SLADVHIEV

SEQ ID NO: 2263 - protein, 9 aa, Homo sapiens
SLAEGLRTV

SEQ ID NO: 2264 - protein, 9 aa, Homo sapiens
SLAEGRLYL

SEQ ID NO: 2265 - protein, 9 aa, Homo sapiens
SLAEKIQAL

SEQ ID NO: 2266 - protein, 10 aa, Homo sapiens
SLAELKGFEV

SEQ ID NO: 2267 - protein, 9 aa, Homo sapiens
SLAELVHAV

SEQ ID NO: 2268 - protein, 10 aa, Homo sapiens
SLAETDKITL

SEQ ID NO: 2269 - protein, 9 aa, Homo sapiens
SLAHELWKV

SEQ ID NO: 2270 - protein, 9 aa, Homo sapiens
SLANETHQL

SEQ ID NO: 2271 - protein, 9 aa, Homo sapiens
SLAPIIVHV

SEQ ID NO: 2272 - protein, 9 aa, Homo sapiens
SLAQYNPKL

SEQ ID NO: 2273 - protein, 9 aa, Homo sapiens
SLASIHVPL

SEQ ID NO: 2274 - protein, 9 aa, Homo sapiens
SLASLLAKV

SEQ ID NO: 2275 - protein, 9 aa, Homo sapiens
SLATSLPRL

SEQ ID NO: 2276 - protein, 11 aa, Homo sapiens
SLDESGEHMGV

SEQ ID NO: 2277 - protein, 9 aa, Homo sapiens
SLDNRINEV

SEQ ID NO: 2278 - protein, 9 aa, Homo sapiens
SLDSTLHAV

SEQ ID NO: 2279 - protein, 10 aa, Homo sapiens
SLFAGGMLRV

SEQ ID NO: 2280 - protein, 10 aa, Homo sapiens
SLFDLDGPKV

SEQ ID NO: 2281 - protein, 10 aa, Homo sapiens
SLFEKGLKNV

SEQ ID NO: 2282 - protein, 9 aa, Homo sapiens
SLFERLVKV

SEQ ID NO: 2283 - protein, 9 aa, Homo sapiens
SLFGGSVKL

SEQ ID NO: 2284 - protein, 10 aa, Homo sapiens
SLFPHNPQFI

SEQ ID NO: 2285 - protein, 9 aa, Homo sapiens
SLFQSRISL

SEQ ID NO: 2286 - protein, 9 aa, Homo sapiens
SLFRVITEV

SEQ ID NO: 2287 - protein, 8 aa, Homo sapiens
SLGKVFGV

SEQ ID NO: 2288 - protein, 9 aa, Homo sapiens
SLGRFEITV

SEQ ID NO: 2289 - protein, 10 aa, Homo sapiens
SLGSALRPST

SEQ ID NO: 2290 - protein, 9 aa, Homo sapiens
SLIAGVIRV

SEQ ID NO: 2291 - protein, 9 aa, Homo sapiens
SLIDKTTAA

SEQ ID NO: 2292 - protein, 9 aa, Homo sapiens
SLIEKIPTA

SEQ ID NO: 2293 - protein, 9 aa, Homo sapiens
SLIEKLWQT

SEQ ID NO: 2294 - protein, 9 aa, Homo sapiens
SLIEKYFSV

SEQ ID NO: 2295 - protein, 9 aa, Homo sapiens
SLIGNLHLA

SEQ ID NO: 2296 - protein, 9 aa, Homo sapiens
SLIQRLMSV

SEQ ID NO: 2297 - protein, 9 aa, Homo sapiens
SLKNRIESV

SEQ ID NO: 2298 - protein, 9 aa, Homo sapiens
SLLDKIIGA

SEQ ID NO: 2299 - protein, 11 aa, Homo sapiens
SLLEDKGLAEV

SEQ ID NO: 2300 - protein, 9 aa, Homo sapiens
SLLEHLSHV

SEQ ID NO: 2301 - protein, 10 aa, Homo sapiens
SLLEKELESV

SEQ ID NO: 2302 - protein, 10 aa, Homo sapiens
SLLEKQQIYL

SEQ ID NO: 2303 - protein, 9 aa, Homo sapiens
SLLENIAKA

SEQ ID NO: 2304 - protein, 9 aa, Homo sapiens
SLLENLEKI

SEQ ID NO: 2305 - protein, 9 aa, Homo sapiens
SLLESVQKL

SEQ ID NO: 2306 - protein, 12 aa, Homo sapiens
SLLGGDVVSVKL

SEQ ID NO: 2307 - protein, 11 aa, Homo sapiens
SLLKEPQKVQL

SEQ ID NO: 2308 - protein, 9 aa, Homo sapiens
SLLKRDFGA

SEQ ID NO: 2309 - protein, 10 aa, Homo sapiens
SLLPTEQPRL

SEQ ID NO: 2310 - protein, 9 aa, Homo sapiens
SLLQKQIML

SEQ ID NO: 2311 - protein, 9 aa, Homo sapiens
SLLQTLYKV

SEQ ID NO: 2312 - protein, 9 aa, Homo sapiens
SLLQTQHAL

SEQ ID NO: 2313 - protein, 9 aa, Homo sapiens
SLLRVGWSV

SEQ ID NO: 2314 - protein, 9 aa, Homo sapiens
SLLTSTVQV

SEQ ID NO: 2315 - protein, 9 aa, Homo sapiens
SLMEKISKL

SEQ ID NO: 2316 - protein, 11 aa, Homo sapiens
SLMEKVRNMAL

SEQ ID NO: 2317 - protein, 10 aa, Homo sapiens
SLMGPVVHEV

SEQ ID NO: 2318 - protein, 9 aa, Homo sapiens
SLNGLEVHL

SEQ ID NO: 2319 - protein, 9 aa, Homo sapiens
SLNKHVEAV

SEQ ID NO: 2320 - protein, 9 aa, Homo sapiens
SLPDHLPSV

SEQ ID NO: 2321 - protein, 9 aa, Homo sapiens
SLPDIKVYL

SEQ ID NO: 2322 - protein, 9 aa, Homo sapiens
SLPKKLALL

SEQ ID NO: 2323 - protein, 9 aa, Homo sapiens
SLQDEIQRV

SEQ ID NO: 2324 - protein, 9 aa, Homo sapiens
SLQEKLWAI

SEQ ID NO: 2325 - protein, 9 aa, Homo sapiens
SLREACETV

SEQ ID NO: 2326 - protein, 9 aa, Homo sapiens
SLSDKTPSV

SEQ ID NO: 2327 - protein, 9 aa, Homo sapiens
SLSDTVEKL

SEQ ID NO: 2328 - protein, 9 aa, Homo sapiens
SLSFMNPRL

SEQ ID NO: 2329 - protein, 9 aa, Homo sapiens
SLSSFLHGV

SEQ ID NO: 2330 - protein, 11 aa, Homo sapiens
SLVENIERLKV

SEQ ID NO: 2331 - protein, 9 aa, Homo sapiens
SLVNQVPKI

SEQ ID NO: 2332 - protein, 9 aa, Homo sapiens
SLWANPKYV

SEQ ID NO: 2333 - protein, 9 aa, Homo sapiens
SLYDWNVKL

SEQ ID NO: 2334 - protein, 9 aa, Homo sapiens
SLYEMVSRV

SEQ ID NO: 2335 - protein, 9 aa, Homo sapiens
SLYGYLRGA

SEQ ID NO: 2336 - protein, 9 aa, Homo sapiens
SLYSQVHQI

SEQ ID NO: 2337 - protein, 9 aa, Homo sapiens
SMLDDLRNV

SEQ ID NO: 2338 - protein, 9 aa, Homo sapiens
SMLEDVQRA

SEQ ID NO: 2339 - protein, 9 aa, Homo sapiens
SMLNRILAV

SEQ ID NO: 2340 - protein, 9 aa, Homo sapiens
SMLQKTWLL

SEQ ID NO: 2341 - protein, 9 aa, Homo sapiens
SMMDRMFAL

SEQ ID NO: 2342 - protein, 9 aa, Homo sapiens
SMYDKVLML

SEQ ID NO: 2343 - protein, 9 aa, Homo sapiens
SVLGKIWKL

SEQ ID NO: 2344 - protein, 9 aa, Homo sapiens
TLAAAVPKI

SEQ ID NO: 2345 - protein, 9 aa, Homo sapiens
TLADVLYHV

SEQ ID NO: 2346 - protein, 10 aa, Homo sapiens
TLAEIAKVEL

SEQ ID NO: 2347 - protein, 9 aa, Homo sapiens
TLAQRVKEV

SEQ ID NO: 2348 - protein, 9 aa, Homo sapiens
TLDAGNIKL

SEQ ID NO: 2349 - protein, 9 aa, Homo sapiens
TLDDKKVYL

SEQ ID NO: 2350 - protein, 9 aa, Homo sapiens
TLDEKIEKV

SEQ ID NO: 2351 - protein, 9 aa, Homo sapiens
TLDEYTTRV

SEQ ID NO: 2352 - protein, 9 aa, Homo sapiens
TLDITPHTV

SEQ ID NO: 2353 - protein, 9 aa, Homo sapiens
TLFDYEVRL

SEQ ID NO: 2354 - protein, 9 aa, Homo sapiens
TLFTKELVL

SEQ ID NO: 2355 - protein, 9 aa, Homo sapiens
TLHRETFYL

SEQ ID NO: 2356 - protein, 11 aa, Homo sapiens
TLIDLPGITKV

SEQ ID NO: 2357 - protein, 9 aa, Homo sapiens
TLIEELKTL

SEQ ID NO: 2358 - protein, 10 aa, Homo sapiens
TLITDGMRSV

SEQ ID NO: 2359 - protein, 9 aa, Homo sapiens
TLLDRMVHL

SEQ ID NO: 2360 - protein, 10 aa, Homo sapiens
TLLDSPYARV

SEQ ID NO: 2361 - protein, 10 aa, Homo sapiens
TLLEDGTFKV

SEQ ID NO: 2362 - protein, 9 aa, Homo sapiens
TLLERAFSL

SEQ ID NO: 2363 - protein, 9 aa, Homo sapiens
TLLGHEFVL

SEQ ID NO: 2364 - protein, 9 aa, Homo sapiens
TLLGHLDYI

SEQ ID NO: 2365 - protein, 9 aa, Homo sapiens
TLLIQVPRI

SEQ ID NO: 2366 - protein, 9 aa, Homo sapiens
TLLNVIKSV

SEQ ID NO: 2367 - protein, 9 aa, Homo sapiens
TLLSNIQGV

SEQ ID NO: 2368 - protein, 9 aa, Homo sapiens
TLLVVVPKL

SEQ ID NO: 2369 - protein, 9 aa, Homo sapiens
TLMERTVSL

SEQ ID NO: 2370 - protein, 9 aa, Homo sapiens
TLNDREYQL

SEQ ID NO: 2371 - protein, 9 aa, Homo sapiens
TLNEKLFLL

SEQ ID NO: 2372 - protein, 9 aa, Homo sapiens
TLQEQLEKA

SEQ ID NO: 2373 - protein, 10 aa, Homo sapiens
TLQKEGVIGV

SEQ ID NO: 2374 - protein, 9 aa, Homo sapiens
TLSERLWGL

SEQ ID NO: 2375 - protein, 9 aa, Homo sapiens
TLSFMNPRL

SEQ ID NO: 2376 - protein, 11 aa, Homo sapiens
TLVQSTLTLQL

SEQ ID NO: 2377 - protein, 9 aa, Homo sapiens
TLVYHVVGV

SEQ ID NO: 2378 - protein, 11 aa, Homo sapiens
TLYDIAHTPGV

SEQ ID NO: 2379 - protein, 9 aa, Homo sapiens
TLYEAVREV

SEQ ID NO: 2380 - protein, 11 aa, Homo sapiens
TMAKESSIIGV

SEQ ID NO: 2381 - protein, 9 aa, Homo sapiens
TMVDRIEEV

SEQ ID NO: 2382 - protein, 9 aa, Herpes simplex virus (type 1 / strain 17)
TMYYKDVTV

SEQ ID NO: 2383 - protein, 12 aa, Homo sapiens
TTGAGNPVGDKL

SEQ ID NO: 2384 - protein, 9 aa, Homo sapiens
TVADKIHSV

SEQ ID NO: 2385 - protein, 9 aa, Homo sapiens
TVLGKIWKL

SEQ ID NO: 2386 - protein, 9 aa, Homo sapiens
TVMDEIHTV

SEQ ID NO: 2387 - protein, 10 aa, Homo sapiens
VIDKFGSDII

SEQ ID NO: 2388 - protein, 9 aa, Homo sapiens
VIIEKTYSL

SEQ ID NO: 2389 - protein, 9 aa, Homo sapiens
VIIPLLHTV

SEQ ID NO: 2390 - protein, 10 aa, Homo sapiens
VILEGELERA

SEQ ID NO: 2391 - protein, 9 aa, Homo sapiens
VIMDRAPSV

SEQ ID NO: 2392 - protein, 9 aa, Homo sapiens
VIMKSSPEV

SEQ ID NO: 2393 - protein, 9 aa, Homo sapiens
VIWGKVTRA

SEQ ID NO: 2394 - protein, 9 aa, Homo sapiens
VLADALKSI

SEQ ID NO: 2395 - protein, 9 aa, Homo sapiens
VLADLKVQL

SEQ ID NO: 2396 - protein, 9 aa, Homo sapiens
VLADQEVRL

SEQ ID NO: 2397 - protein, 9 aa, Homo sapiens
VLAEQLHQA

SEQ ID NO: 2398 - protein, 9 aa, Homo sapiens
VLAHTILGV

SEQ ID NO: 2399 - protein, 10 aa, Homo sapiens
VLAPLPLHGV

SEQ ID NO: 2400 - protein, 9 aa, Homo sapiens
VLDASVKEV

SEQ ID NO: 2401 - protein, 9 aa, Homo sapiens
VLDNVKMNL

SEQ ID NO: 2402 - protein, 9 aa, Homo sapiens
VLDSVDVRL

SEQ ID NO: 2403 - protein, 10 aa, Homo sapiens
VLFEGRTVQL

SEQ ID NO: 2404 - protein, 9 aa, Homo sapiens
VLFGVETHV

SEQ ID NO: 2405 - protein, 9 aa, Homo sapiens
VLFHNLPSL

SEQ ID NO: 2406 - protein, 9 aa, Homo sapiens
VLFNKLTYL

SEQ ID NO: 2407 - protein, 9 aa, Homo sapiens
VLFTGVKEV

SEQ ID NO: 2408 - protein, 11 aa, Homo sapiens
VLGGKAFLEHL

SEQ ID NO: 2409 - protein, 9 aa, Homo sapiens
VLHKELPEV

SEQ ID NO: 2410 - protein, 9 aa, Homo sapiens
VLIDYQRNV

SEQ ID NO: 2411 - protein, 9 aa, Homo sapiens
VLIGHSYGV

SEQ ID NO: 2412 - protein, 9 aa, Homo sapiens
VLIPKLPQL

SEQ ID NO: 2413 - protein, 9 aa, Homo sapiens
VLLDGIHRV

SEQ ID NO: 2414 - protein, 12 aa, Homo sapiens
VLLDTANKKVFL

SEQ ID NO: 2415 - protein, 9 aa, Homo sapiens
VLLELQQHL

SEQ ID NO: 2416 - protein, 9 aa, Homo sapiens
VLLGHIFYV

SEQ ID NO: 2417 - protein, 9 aa, Homo sapiens
VLLGKVYVV

SEQ ID NO: 2418 - protein, 10 aa, Homo sapiens
VLLKARLVPA

SEQ ID NO: 2419 - protein, 11 aa, Homo sapiens
VLLSDSNLHDA

SEQ ID NO: 2420 - protein, 9 aa, Homo sapiens
VLLSIYPRV

SEQ ID NO: 2421 - protein, 9 aa, Homo sapiens
VLLSTIHEL

SEQ ID NO: 2422 - protein, 9 aa, Homo sapiens
VLLTGLHAV

SEQ ID NO: 2423 - protein, 9 aa, Homo sapiens
VLLTRLENV

SEQ ID NO: 2424 - protein, 9 aa, Homo sapiens
VLMDHILNL

SEQ ID NO: 2425 - protein, 9 aa, Homo sapiens
VLMDRLPSL

SEQ ID NO: 2426 - protein, 9 aa, Homo sapiens
VLMEKPDVV

SEQ ID NO: 2427 - protein, 9 aa, Homo sapiens
VLMEMSYRL

SEQ ID NO: 2428 - protein, 9 aa, Homo sapiens
VLMEYIRSL

SEQ ID NO: 2429 - protein, 9 aa, Homo sapiens
VLMKDVQEI

SEQ ID NO: 2430 - protein, 10 aa, Homo sapiens
VLMQDSRLYL

SEQ ID NO: 2431 - protein, 9 aa, Homo sapiens
VLNEYFHNV

SEQ ID NO: 2432 - protein, 9 aa, Homo sapiens
VLNNVVIHL

SEQ ID NO: 2433 - protein, 9 aa, Homo sapiens
VLQEKVPEI

SEQ ID NO: 2434 - protein, 9 aa, Homo sapiens
VLQGRLPAV

SEQ ID NO: 2435 - protein, 10 aa, Homo sapiens
VLQNLKGQYV

SEQ ID NO: 2436 - protein, 9 aa, Homo sapiens
VLQQHLETL

SEQ ID NO: 2437 - protein, 9 aa, Homo sapiens
VLSELAARL

SEQ ID NO: 2438 - protein, 12 aa, Homo sapiens
VLSPADKTNVKA

SEQ ID NO: 2439 - protein, 9 aa, Homo sapiens
VLSSRLAFA

SEQ ID NO: 2440 - protein, 9 aa, Homo sapiens
VLTEFTREV

SEQ ID NO: 2441 - protein, 9 aa, Homo sapiens
VLTEHSEEL

SEQ ID NO: 2442 - protein, 9 aa, Homo sapiens
VLTSEVHSV

SEQ ID NO: 2443 - protein, 11 aa, Homo sapiens
VLVDDDGIKVV

SEQ ID NO: 2444 - protein, 9 aa, Homo sapiens
VLVDQTTGL

SEQ ID NO: 2445 - protein, 9 aa, Homo sapiens
VLVDRTIYI

SEQ ID NO: 2446 - protein, 11 aa, Homo sapiens
VLVEDSNNHHL

SEQ ID NO: 2447 - protein, 9 aa, Homo sapiens
VLVESEHQV

SEQ ID NO: 2448 - protein, 10 aa, Homo sapiens
VLVPGHLQSV

SEQ ID NO: 2449 - protein, 9 aa, Homo sapiens
VLWDRTFSL

SEQ ID NO: 2450 - protein, 9 aa, Homo sapiens
VLWGETVHL

SEQ ID NO: 2451 - protein, 9 aa, Homo sapiens
VLYDQPRHV

SEQ ID NO: 2452 - protein, 9 aa, Homo sapiens
VLYDRPLKI

SEQ ID NO: 2453 - protein, 9 aa, Homo sapiens
VLYEKDIQL

SEQ ID NO: 2454 - protein, 9 aa, Homo sapiens
VLYENKVAV

SEQ ID NO: 2455 - protein, 9 aa, Homo sapiens
VLYGKLVEA

SEQ ID NO: 2456 - protein, 10 aa, Homo sapiens
VLYGPKIDRA

SEQ ID NO: 2457 - protein, 9 aa, Homo sapiens
VLYHVETEV

SEQ ID NO: 2458 - protein, 10 aa, Homo sapiens
VLYPHEPTAV

SEQ ID NO: 2459 - protein, 9 aa, Homo sapiens
VLYTGDFRL

SEQ ID NO: 2460 - protein, 9 aa, Homo sapiens
VLYTGVVRV

SEQ ID NO: 2461 - protein, 10 aa, Homo sapiens
VMFGGKQVVV

SEQ ID NO: 2462 - protein, 9 aa, Homo sapiens
VMFNGKVYL

SEQ ID NO: 2463 - protein, 10 aa, Homo sapiens
VMFRTPLASV

SEQ ID NO: 2464 - protein, 8 aa, Homo sapiens
VMGKIFAV

SEQ ID NO: 2465 - protein, 10 aa, Homo sapiens
VMIAGKVAVV

SEQ ID NO: 2466 - protein, 9 aa, Homo sapiens
VMLEYVERA

SEQ ID NO: 2467 - protein, 9 aa, Homo sapiens
VMYGKVYRI

SEQ ID NO: 2468 - protein, 9 aa, Homo sapiens
VTLNKPQGL

SEQ ID NO: 2469 - protein, 9 aa, Homo sapiens
VTSLEKSLI

SEQ ID NO: 2470 - protein, 9 aa, Homo sapiens
WLAEKLPTL

SEQ ID NO: 2471 - protein, 9 aa, Homo sapiens
WLEENVHEV

SEQ ID NO: 2472 - protein, 11 aa, Homo sapiens
WLIEDGKVVTV

SEQ ID NO: 2473 - protein, 9 aa, Homo sapiens
WLVDHVYAI

SEQ ID NO: 2474 - protein, 9 aa, Human gammaherpesvirus 4
WQWEHIPPA

SEQ ID NO: 2475 - protein, 9 aa, Homo sapiens
YALNHTLSV

SEQ ID NO: 2476 - protein, 9 aa, Homo sapiens
YAYEKPHVV

SEQ ID NO: 2477 - protein, 9 aa, Homo sapiens
YGVKAGPGV

SEQ ID NO: 2478 - protein, 9 aa, Homo sapiens
YIAKITEGV

SEQ ID NO: 2479 - protein, 9 aa, Homo sapiens
YIFDNVAKV

SEQ ID NO: 2480 - protein, 10 aa, Homo sapiens
YIMDNKLAQI

SEQ ID NO: 2481 - protein, 9 aa, Homo sapiens
YIMSYISRV

SEQ ID NO: 2482 - protein, 9 aa, Homo sapiens
YIWDRHYNI

SEQ ID NO: 2483 - protein, 11 aa, Homo sapiens
YLADPAKFPEA

SEQ ID NO: 2484 - protein, 9 aa, Homo sapiens
YLAHAIHQV

SEQ ID NO: 2485 - protein, 9 aa, Homo sapiens
YLAKHIENI

SEQ ID NO: 2486 - protein, 9 aa, Herpes simplex virus (type 1 / strain 17)
YLANGGFLI

SEQ ID NO: 2487 - protein, 9 aa, Homo sapiens
YLAPFLRNV

SEQ ID NO: 2488 - protein, 9 aa, Homo sapiens
YLAPHVRTL

SEQ ID NO: 2489 - protein, 9 aa, Homo sapiens
YLASLIRSV

SEQ ID NO: 2490 - protein, 9 aa, Homo sapiens
YLDEIVKEV

SEQ ID NO: 2491 - protein, 9 aa, Homo sapiens
YLDEYIARM

SEQ ID NO: 2492 - protein, 9 aa, Homo sapiens
YLDFTNPKV

SEQ ID NO: 2493 - protein, 9 aa, Homo sapiens
YLDLSENRL

SEQ ID NO: 2494 - protein, 9 aa, Homo sapiens
YLDLSNNRL

SEQ ID NO: 2495 - protein, 9 aa, Homo sapiens
YLDPAQRGV

SEQ ID NO: 2496 - protein, 9 aa, Homo sapiens
YLDRFLAGV

SEQ ID NO: 2497 - protein, 11 aa, Homo sapiens
YLDVSVGKIVA

SEQ ID NO: 2498 - protein, 9 aa, Homo sapiens
YLDWTIERV

SEQ ID NO: 2499 - protein, 9 aa, Homo sapiens
YLEDKSYKL

SEQ ID NO: 2500 - protein, 9 aa, Homo sapiens
YLEEYKFQV

SEQ ID NO: 2501 - protein, 9 aa, Homo sapiens
YLEPYLKEV

SEQ ID NO: 2502 - protein, 10 aa, Homo sapiens
YLFAHAVDFV

SEQ ID NO: 2503 - protein, 9 aa, Homo sapiens
YLFERTFNL

SEQ ID NO: 2504 - protein, 9 aa, Homo sapiens
YLFREPATI

SEQ ID NO: 2505 - protein, 9 aa, Homo sapiens
YLFTSPQRV

SEQ ID NO: 2506 - protein, 9 aa, Homo sapiens
YLGPHIASV

SEQ ID NO: 2507 - protein, 8 aa, Homo sapiens
YLGQVTTI

SEQ ID NO: 2508 - protein, 9 aa, Homo sapiens
YLHNQGIGV

SEQ ID NO: 2509 - protein, 9 aa, Homo sapiens
YLHRQVAAV

SEQ ID NO: 2510 - protein, 9 aa, Homo sapiens
YLIDGTHKI

SEQ ID NO: 2511 - protein, 11 aa, Homo sapiens
YLISQVEGHQV

SEQ ID NO: 2512 - protein, 9 aa, Homo sapiens
YLITHPLAV

SEQ ID NO: 2513 - protein, 10 aa, Homo sapiens
YLLDHAPPEI

SEQ ID NO: 2514 - protein, 10 aa, Homo sapiens
YLLDKETLRL

SEQ ID NO: 2515 - protein, 9 aa, Homo sapiens
YLLDQHILI

SEQ ID NO: 2516 - protein, 9 aa, Homo sapiens
YLLEKSRAV

SEQ ID NO: 2517 - protein, 9 aa, Homo sapiens
YLLEKSRVI

SEQ ID NO: 2518 - protein, 9 aa, Homo sapiens
YLLESVNKL

SEQ ID NO: 2519 - protein, 9 aa, Homo sapiens
YLLGHDIRI

SEQ ID NO: 2520 - protein, 9 aa, Homo sapiens
YLLHEKLNL

SEQ ID NO: 2521 - protein, 10 aa, Homo sapiens
YLLLKGVEAV

SEQ ID NO: 2522 - protein, 9 aa, Homo sapiens
YLLLKTHQL

SEQ ID NO: 2523 - protein, 9 aa, Homo sapiens
YLLPFSKSI

SEQ ID NO: 2524 - protein, 11 aa, Homo sapiens
YLLPKDQGITL

SEQ ID NO: 2525 - protein, 10 aa, Homo sapiens
YLLQEPPRTV

SEQ ID NO: 2526 - protein, 9 aa, Homo sapiens
YLLQRAVEV

SEQ ID NO: 2527 - protein, 9 aa, Homo sapiens
YLLRSLDYV

SEQ ID NO: 2528 - protein, 9 aa, Homo sapiens
YLLTESSKL

SEQ ID NO: 2529 - protein, 10 aa, Homo sapiens
YLLTHPPPIM

SEQ ID NO: 2530 - protein, 9 aa, Homo sapiens
YLLTRNPHL

SEQ ID NO: 2531 - protein, 10 aa, Homo sapiens
YLMEGSYNKV

SEQ ID NO: 2532 - protein, 10 aa, Homo sapiens
YLMEQNVTKL

SEQ ID NO: 2533 - protein, 9 aa, Homo sapiens
YLMEVTHDL

SEQ ID NO: 2534 - protein, 9 aa, Homo sapiens
YLMVENIRL

SEQ ID NO: 2535 - protein, 9 aa, Homo sapiens
YLNDFTHEI

SEQ ID NO: 2536 - protein, 9 aa, Homo sapiens
YLNDLIHSV

SEQ ID NO: 2537 - protein, 9 aa, Homo sapiens
YLNDRVDEL

SEQ ID NO: 2538 - protein, 9 aa, Homo sapiens
YLNKEIEEA

SEQ ID NO: 2539 - protein, 9 aa, Homo sapiens
YLNQHIEHV

SEQ ID NO: 2540 - protein, 9 aa, Homo sapiens
YLNTRLFTV

SEQ ID NO: 2541 - protein, 11 aa, Homo sapiens
YLPDIIKDQKA

SEQ ID NO: 2542 - protein, 9 aa, Homo sapiens
YLPEDFIRV

SEQ ID NO: 2543 - protein, 9 aa, Homo sapiens
YLPSQVSRV

SEQ ID NO: 2544 - protein, 9 aa, Homo sapiens
YLPYPIHQV

SEQ ID NO: 2545 - protein, 9 aa, Homo sapiens
YLQAHTQSV

SEQ ID NO: 2546 - protein, 9 aa, Homo sapiens
YLQEHAQEV

SEQ ID NO: 2547 - protein, 9 aa, Homo sapiens
YLQEKLHAL

SEQ ID NO: 2548 - protein, 9 aa, Homo sapiens
YLQPKLLGI

SEQ ID NO: 2549 - protein, 9 aa, Homo sapiens
YLQQVNHKL

SEQ ID NO: 2550 - protein, 11 aa, Homo sapiens
YLRSVGDGETV

SEQ ID NO: 2551 - protein, 9 aa, Homo sapiens
YLSAVRATL

SEQ ID NO: 2552 - protein, 10 aa, Homo sapiens
YLSDIPLHDA

SEQ ID NO: 2553 - protein, 9 aa, Homo sapiens
YLSDNVHLV

SEQ ID NO: 2554 - protein, 9 aa, Homo sapiens
YLSKIIPAL

SEQ ID NO: 2555 - protein, 9 aa, Homo sapiens
YLSPDLSKV

SEQ ID NO: 2556 - protein, 9 aa, Homo sapiens
YLSPKLWAL

SEQ ID NO: 2557 - protein, 9 aa, Homo sapiens
YLSSLQPRL

SEQ ID NO: 2558 - protein, 9 aa, Homo sapiens
YLSVKVWDL

SEQ ID NO: 2559 - protein, 9 aa, Homo sapiens
YLTDRVMTV

SEQ ID NO: 2560 - protein, 10 aa, Homo sapiens
YLTNEGIQYL

SEQ ID NO: 2561 - protein, 9 aa, Homo sapiens
YLVAEKVTV

SEQ ID NO: 2562 - protein, 9 aa, Homo sapiens
YLVDFTQKI

SEQ ID NO: 2563 - protein, 9 aa, Homo sapiens
YLVEDIQHI

SEQ ID NO: 2564 - protein, 9 aa, Homo sapiens
YLWQGVRVA

SEQ ID NO: 2565 - protein, 9 aa, Homo sapiens
YLWRTSLYL

SEQ ID NO: 2566 - protein, 9 aa, Homo sapiens
YLYDLNHTL

SEQ ID NO: 2567 - protein, 9 aa, Homo sapiens
YLYGIRVEV

SEQ ID NO: 2568 - protein, 9 aa, Homo sapiens
YLYPDITRL

SEQ ID NO: 2569 - protein, 9 aa, Homo sapiens
YLYTKEQLL

SEQ ID NO: 2570 - protein, 9 aa, Homo sapiens
YMADRLLGV

SEQ ID NO: 2571 - protein, 11 aa, Homo sapiens
YMGEEKLIASV

SEQ ID NO: 2572 - protein, 9 aa, Homo sapiens
YMLEHVITL

SEQ ID NO: 2573 - protein, 9 aa, Homo sapiens
YMLGLEARL

SEQ ID NO: 2574 - protein, 9 aa, Homo sapiens
YMNHIMVSV

SEQ ID NO: 2575 - protein, 9 aa, Homo sapiens
YMYEKESEL

SEQ ID NO: 2576 - protein, 9 aa, Homo sapiens
YQYPVIIHL

SEQ ID NO: 2577 - protein, 9 aa, Homo sapiens
YTTDRVMTV

SEQ ID NO: 2578 - protein, 10 aa, Homo sapiens
YTYDEAIHSV

SEQ ID NO: 2579 - protein, 10 aa, Homo sapiens
YVFEGKMLEA

SEQ ID NO: 2580 - protein, 9 aa, Homo sapiens
YVFPGVTRL

SEQ ID NO: 2581 - protein, 11 aa, Homo sapiens
YVIDPIKGLKL

SEQ ID NO: 2582 - protein, 9 aa, Homo sapiens
YVLEGLKSV

SEQ ID NO: 2583 - protein, 9 aa, Homo sapiens
YVLPEVSKV

SEQ ID NO: 2584 - protein, 9 aa, Homo sapiens
YVVPFVAKV

SEQ ID NO: 2585 - protein, 10 aa, Homo sapiens
YVYDKDIEQI

SEQ ID NO: 2586 - protein, 9 aa, Homo sapiens
ILAAFLHWL

SEQ ID NO: 2587 - protein, 9 aa, Homo sapiens
ILAKFAHWL

SEQ ID NO: 2588 - protein, 9 aa, Influenza A virus (A/Anhui/1-YK_RG134/2013(H7N9))
AIVDKNITL

SEQ ID NO: 2589 - protein, 10 aa, H7N9 subtype
IVDKNITLKA

SEQ ID NO: 2590 - protein, 9 aa, Homo sapiens
FLAPLVTEY

SEQ ID NO: 2591 - protein, 9 aa, Homo sapiens
ALLERGYSL

SEQ ID NO: 2592 - protein, 9 aa, Homo sapiens
FAHPYQYEL

SEQ ID NO: 2593 - protein, 9 aa, Homo sapiens
GLNKKPMSL

SEQ ID NO: 2594 - protein, 9 aa, Homo sapiens
KATAYILSV

SEQ ID NO: 2595 - protein, 9 aa, Homo sapiens
KLINSQISL

SEQ ID NO: 2596 - protein, 10 aa, Homo sapiens
KLPLPLPPRL

SEQ ID NO: 2597 - protein, 10 aa, Homo sapiens
KMAEVIGSKL

SEQ ID NO: 2598 - protein, 10 aa, Homo sapiens
KVCNPIITKL

SEQ ID NO: 2599 - protein, 11 aa, Homo sapiens
KVLDTIMATKL

SEQ ID NO: 2600 - protein, 10 aa, Homo sapiens
RLAEWKATKL

SEQ ID NO: 2601 - protein, 9 aa, Homo sapiens
RSIEKSNSV

SEQ ID NO: 2602 - protein, 9 aa, Homo sapiens
TLNEKLTAL

SEQ ID NO: 2603 - protein, 9 aa, Homo sapiens
VATEGSREL

SEQ ID NO: 2604 - protein, 9 aa, Homo sapiens
YANYYTREV

SEQ ID NO: 2605 - protein, 10 aa, Homo sapiens
AIYDHINEGV

SEQ ID NO: 2606 - protein, 10 aa, Homo sapiens
AIYDHVNEGV

SEQ ID NO: 2607 - protein, 9 aa, Homo sapiens
ALAPAPAEV

SEQ ID NO: 2608 - protein, 9 aa, Homo sapiens
ALAPAPVEV

SEQ ID NO: 2609 - protein, 11 aa, Homo sapiens
ASEAIKGAVVG

SEQ ID NO: 2610 - protein, 9 aa, Homo sapiens
ATIGVLLDL

SEQ ID NO: 2611 - protein, 9 aa, Homo sapiens
DTAPPRDSW

SEQ ID NO: 2612 - protein, 10 aa, Artificial Sequence
  unknown
FVAGTQEVFV

SEQ ID NO: 2613 - protein, 11 aa, Homo sapiens
GLLGQEGLVEI

SEQ ID NO: 2614 - protein, 11 aa, Homo sapiens
GLPGQEGLVEI

SEQ ID NO: 2615 - protein, 11 aa, Homo sapiens
GQSELASRLTL

SEQ ID NO: 2616 - protein, 11 aa, Homo sapiens
IAVGYVDDTQF

SEQ ID NO: 2617 - protein, 10 aa, Homo sapiens
ILFPDIIARA

SEQ ID NO: 2618 - protein, 11 aa, Homo sapiens
LRVAPEEHPVL

SEQ ID NO: 2619 - protein, 11 aa, Homo sapiens
MLAPEAVILVM

SEQ ID NO: 2620 - protein, 9 aa, Homo sapiens
MLDPLEVHL

SEQ ID NO: 2621 - protein, 9 aa, Homo sapiens
MVLTRIIAI

SEQ ID NO: 2622 - protein, 8 aa, Homo sapiens
PELLLLPL

SEQ ID NO: 2623 - protein, 9 aa, Homo sapiens
PLLLLLLGL

SEQ ID NO: 2624 - protein, 9 aa, Homo sapiens
SLPKHSVTI

SEQ ID NO: 2625 - protein, 9 aa, Homo sapiens
SQYPFPVTL

SEQ ID NO: 2626 - protein, 11 aa, Homo sapiens
SVAEGRALMSV

SEQ ID NO: 2627 - protein, 9 aa, Homo sapiens
TAALFIILL

SEQ ID NO: 2628 - protein, 9 aa, Homo sapiens
TEWIKAIQM

SEQ ID NO: 2629 - protein, 9 aa, Artificial Sequence
  Unknown
TFLKIIPML

SEQ ID NO: 2630 - protein, 9 aa, Homo sapiens
TLLKQLKEA

SEQ ID NO: 2631 - protein, 9 aa, Artificial Sequence
  unknwon
TQIHSMVNL

SEQ ID NO: 2632 - protein, 8 aa, Homo sapiens
VLDELVRP

SEQ ID NO: 2633 - protein, 9 aa, Homo sapiens
YTLILKTIL

SEQ ID NO: 2634 - protein, 9 aa, Homo sapiens
FLPEAPAEL

SEQ ID NO: 2635 - protein, 9 aa, Homo sapiens
FYDERIVVV

SEQ ID NO: 2636 - protein, 8 aa, Homo sapiens
LSDHHIYL

SEQ ID NO: 2637 - protein, 9 aa, Homo sapiens
MVDGKPVNL

SEQ ID NO: 2638 - protein, 9 aa, Homo sapiens
SFDGIIAMM

SEQ ID NO: 2639 - protein, 9 aa, Homo sapiens
VFDEAIRAV

SEQ ID NO: 2640 - protein, 10 aa, Homo sapiens
VFDEAIRAVL

SEQ ID NO: 2641 - protein, 9 aa, Homo sapiens
VFDPVPVGV

SEQ ID NO: 2642 - protein, 10 aa, Homo sapiens
VLDDKDYFLF

SEQ ID NO: 2643 - protein, 9 aa, Homo sapiens
YVQDYEDFM

SEQ ID NO: 2644 - protein, 10 aa, Homo sapiens
ALYVDSLFFL

SEQ ID NO: 2645 - protein, 9 aa, Human alphaherpesvirus 2
AKKLHFSTA

SEQ ID NO: 2646 - protein, 9 aa, Human alphaherpesvirus 2
FASPADPKV

SEQ ID NO: 2647 - protein, 9 aa, Human alphaherpesvirus 2
FVLVILARL

SEQ ID NO: 2648 - protein, 9 aa, Human alphaherpesvirus 2
TLVAHGPSL

SEQ ID NO: 2649 - protein, 9 aa, Mycobacterium tuberculosis
AAGNVNIAI

SEQ ID NO: 2650 - protein, 9 aa, Mycobacterium tuberculosis
AAMAAQLQA

SEQ ID NO: 2651 - protein, 9 aa, Mycobacterium tuberculosis
AAMASASLV

SEQ ID NO: 2652 - protein, 9 aa, Mycobacterium tuberculosis
AAQFNASPV

SEQ ID NO: 2653 - protein, 9 aa, Mycobacterium tuberculosis
ALNATDPGA

SEQ ID NO: 2654 - protein, 9 aa, Mycobacterium tuberculosis
ALSAGVGAV

SEQ ID NO: 2655 - protein, 9 aa, Mycobacterium tuberculosis
AMAAQLQAV

SEQ ID NO: 2656 - protein, 9 aa, Mycobacterium tuberculosis
AMASASLVT

SEQ ID NO: 2657 - protein, 9 aa, Mycobacterium tuberculosis
APPPQRAAM

SEQ ID NO: 2658 - protein, 9 aa, Mycobacterium tuberculosis
AQFNASPVA

SEQ ID NO: 2659 - protein, 9 aa, Mycobacterium tuberculosis
AQLQAVPGA

SEQ ID NO: 2660 - protein, 9 aa, Mycobacterium tuberculosis
AQSYLRNFL

SEQ ID NO: 2661 - protein, 9 aa, Mycobacterium tuberculosis
ASPPSTAAA

SEQ ID NO: 2662 - protein, 9 aa, Mycobacterium tuberculosis
GAAQYIGLV

SEQ ID NO: 2663 - protein, 9 aa, Mycobacterium tuberculosis
GAASGPKVV

SEQ ID NO: 2664 - protein, 9 aa, Mycobacterium tuberculosis
GLGNVNGVT

SEQ ID NO: 2665 - protein, 9 aa, Mycobacterium tuberculosis
GWVESDAAH

SEQ ID NO: 2666 - protein, 9 aa, Mycobacterium tuberculosis
GYTSGTGQG

SEQ ID NO: 2667 - protein, 9 aa, Homo sapiens
ILLLSLNPV

SEQ ID NO: 2668 - protein, 9 aa, Mycobacterium tuberculosis
LAAPPPQRA

SEQ ID NO: 2669 - protein, 9 aa, Mycobacterium tuberculosis
LAESIRPLV

SEQ ID NO: 2670 - protein, 9 aa, Mycobacterium tuberculosis
LAIAAMASA

SEQ ID NO: 2671 - protein, 9 aa, Homo sapiens
LLMPTISLI

SEQ ID NO: 2672 - protein, 9 aa, Mycobacterium tuberculosis
LTDGNPPEV

SEQ ID NO: 2673 - protein, 9 aa, Mycobacterium tuberculosis
MASASLVTV

SEQ ID NO: 2674 - protein, 9 aa, Homo sapiens
MLTTLILTL

SEQ ID NO: 2675 - protein, 9 aa, Mycobacterium tuberculosis
MSLTVGAGV

SEQ ID NO: 2676 - protein, 9 aa, Mycobacterium tuberculosis
NAPPPPVIA

SEQ ID NO: 2677 - protein, 9 aa, Homo sapiens
PLLIPTSKL

SEQ ID NO: 2678 - protein, 9 aa, Mycobacterium tuberculosis
PNAPPPPVI

SEQ ID NO: 2679 - protein, 9 aa, Mycobacterium tuberculosis
RLDQKLYAS

SEQ ID NO: 2680 - protein, 9 aa, Mycobacterium tuberculosis
RLSLTALSA

SEQ ID NO: 2681 - protein, 9 aa, Mycobacterium tuberculosis
SASLVTVAV

SEQ ID NO: 2682 - protein, 9 aa, Homo sapiens
SLNPWPPCL

SEQ ID NO: 2683 - protein, 9 aa, Mycobacterium tuberculosis
SLTALSAGV

SEQ ID NO: 2684 - protein, 9 aa, Mycobacterium tuberculosis
TTGDPPFPG

SEQ ID NO: 2685 - protein, 9 aa, Mycobacterium tuberculosis
VAPPPPAAA

SEQ ID NO: 2686 - protein, 9 aa, Mycobacterium tuberculosis
VTGSVVCTT

SEQ ID NO: 2687 - protein, 9 aa, Mycobacterium tuberculosis
VTLGYTSGT

SEQ ID NO: 2688 - protein, 9 aa, Mycobacterium tuberculosis
WLGTANNPV

SEQ ID NO: 2689 - protein, 9 aa, Bacillus pumilus YLFTLLVPL <2690;PRT;Mycobacterium tuberculosis
YLRNFLAAP

SEQ ID NO: 2690 - protein, 9 aa, Mycobacterium tuberculosis
YMPYPGTRI

SEQ ID NO: 2691 - protein, 9 aa, Homo sapiens
YVFTLLVPL

SEQ ID NO: 2692 - protein, 9 aa, Homo sapiens
YVFTLLVSL

SEQ ID NO: 2693 - protein, 10 aa, Homo sapiens
FLMSSWWPNL

SEQ ID NO: 2694 - protein, 10 aa, Homo sapiens
KLCKVRKITV

SEQ ID NO: 2695 - protein, 10 aa, Homo sapiens
NLLDSLEQYI

SEQ ID NO: 2696 - protein, 9 aa, Homo sapiens
VLLRHSKNV

SEQ ID NO: 2697 - protein, 9 aa, Homo sapiens
VLTSESMHV

SEQ ID NO: 2698 - protein, 9 aa, Homo sapiens
VVPEDYWGV

SEQ ID NO: 2699 - protein, 9 aa, Homo sapiens
WLDEVKQAL

SEQ ID NO: 2700 - protein, 9 aa, Human alphaherpesvirus 3
ILIEGIFFV

SEQ ID NO: 2701 - protein, 9 aa, Human alphaherpesvirus 2
ILIEGVFFA

SEQ ID NO: 2702 - protein, 10 aa, Human alphaherpesvirus 3
MILIEGIFFV

SEQ ID NO: 2703 - protein, 9 aa, Hepatitis B virus
FLGGPPVCL

SEQ ID NO: 2704 - protein, 9 aa, Hepatitis B virus
FLKQQYMNL

SEQ ID NO: 2705 - protein, 9 aa, Hepatitis B virus
FLSKQYMDL

SEQ ID NO: 2706 - protein, 9 aa, Hepatitis B virus
GGPNLDNIL

SEQ ID NO: 2707 - protein, 9 aa, Hepatitis B virus
ILRSFIPLL

SEQ ID NO: 2708 - protein, 11 aa, Hepatitis B virus
LTFGRETVLEN

SEQ ID NO: 2709 - protein, 11 aa, Hepatitis B virus
LTTVPAASLLA

SEQ ID NO: 2710 - protein, 9 aa, Hepatitis B virus
TVSTKLCKI

SEQ ID NO: 2711 - protein, 11 aa, Homo sapiens
FAYDGKDYLTL

SEQ ID NO: 2712 - protein, 10 aa, Hepatitis C virus genotype 1
IMAKNEVFCV

SEQ ID NO: 2713 - protein, 9 aa, Hepatitis C virus genotype 1
MLVCGDDLV

SEQ ID NO: 2714 - protein, 9 aa, Hepatitis C virus genotype 1
SVIDCNTCV

SEQ ID NO: 2715 - protein, 9 aa, Hepatitis C virus genotype 1
YLFNWAVRT

SEQ ID NO: 2716 - protein, 9 aa, Hepatitis C virus genotype 1
YVGDLCGSV

SEQ ID NO: 2717 - protein, 10 aa, Hepatitis C virus subtype 1b
QLSGLGINAV

SEQ ID NO: 2718 - protein, 9 aa, Yellow fever virus 17D
SMSMILVGV

SEQ ID NO: 2719 - protein, 9 aa, Homo sapiens
FLDGNELTL

SEQ ID NO: 2720 - protein, 9 aa, Yellow fever virus 17D
FLDPASIAA

SEQ ID NO: 2721 - protein, 9 aa, Homo sapiens
FLLQDTVEL

SEQ ID NO: 2722 - protein, 9 aa, Homo sapiens
HLIDYLVTS

SEQ ID NO: 2723 - protein, 9 aa, Homo sapiens
HLSTAFARV

SEQ ID NO: 2724 - protein, 9 aa, Yellow fever virus 17D
ILNDSGETV

SEQ ID NO: 2725 - protein, 9 aa, Homo sapiens
KLLEPVLLL

SEQ ID NO: 2726 - protein, 9 aa, Homo sapiens
LLIENVASL

SEQ ID NO: 2727 - protein, 9 aa, Yellow fever virus 17D
SMQKTIPLV

SEQ ID NO: 2728 - protein, 9 aa, Homo sapiens
SMSADVPLV

SEQ ID NO: 2729 - protein, 9 aa, Homo sapiens
GIGTDEKML

SEQ ID NO: 2730 - protein, 9 aa, Homo sapiens
GLSEFTEYL

SEQ ID NO: 2731 - protein, 9 aa, Homo sapiens
LLHYLLDAV

SEQ ID NO: 2732 - protein, 9 aa, Homo sapiens
NLVKCQVEL

SEQ ID NO: 2733 - protein, 9 aa, Homo sapiens
SLKYFHTSV

SEQ ID NO: 2734 - protein, 9 aa, Homo sapiens
SVLGRIWKL

SEQ ID NO: 2735 - protein, 9 aa, Homo sapiens
AAPAYSRAL

SEQ ID NO: 2736 - protein, 10 aa, Homo sapiens
HLPETKFSEL

SEQ ID NO: 2737 - protein, 9 aa, Homo sapiens
AAANIIRTL

SEQ ID NO: 2738 - protein, 9 aa, Homo sapiens
AADTERLAL

SEQ ID NO: 2739 - protein, 9 aa, Homo sapiens
AAVRIGSVL

SEQ ID NO: 2740 - protein, 10 aa, Homo sapiens
AVGLVLPAKL

SEQ ID NO: 2741 - protein, 10 aa, Homo sapiens
AVKKNPGIAA

SEQ ID NO: 2742 - protein, 9 aa, Homo sapiens
DIELQAENI

SEQ ID NO: 2743 - protein, 9 aa, Homo sapiens
DLDVKKMPL

SEQ ID NO: 2744 - protein, 9 aa, Homo sapiens
ELNKLLEEI

SEQ ID NO: 2745 - protein, 11 aa, Homo sapiens
FLDPDIGGVAV

SEQ ID NO: 2746 - protein, 9 aa, Homo sapiens
FLKDLVASV

SEQ ID NO: 2747 - protein, 9 aa, Homo sapiens
FMYDRPLRL

SEQ ID NO: 2748 - protein, 9 aa, Homo sapiens
FSITKSVEL

SEQ ID NO: 2749 - protein, 9 aa, Homo sapiens
FSTPHGLEV

SEQ ID NO: 2750 - protein, 10 aa, Homo sapiens
GAAVRIGSVL

SEQ ID NO: 2751 - protein, 10 aa, Homo sapiens
GVIDGHIYAV

SEQ ID NO: 2752 - protein, 9 aa, Homo sapiens
ILDEKPVII

SEQ ID NO: 2753 - protein, 9 aa, Homo sapiens
ISMKILNSL

SEQ ID NO: 2754 - protein, 9 aa, Homo sapiens
KIASQLSKL

SEQ ID NO: 2755 - protein, 10 aa, Homo sapiens
KITVPASQKL

SEQ ID NO: 2756 - protein, 9 aa, Homo sapiens
KLDNQVSKV

SEQ ID NO: 2757 - protein, 10 aa, Homo sapiens
LIYSVGLLLA

SEQ ID NO: 2758 - protein, 9 aa, Homo sapiens
LSEQTSVPL

SEQ ID NO: 2759 - protein, 9 aa, Homo sapiens
LTLGEFLKL

SEQ ID NO: 2760 - protein, 9 aa, Homo sapiens
MIFRSGSLI

SEQ ID NO: 2761 - protein, 10 aa, Homo sapiens
NVSSRFEEEI

SEQ ID NO: 2762 - protein, 9 aa, Homo sapiens
QLLDQVEQI

SEQ ID NO: 2763 - protein, 9 aa, Homo sapiens
RISEVLQKL

SEQ ID NO: 2764 - protein, 12 aa, Homo sapiens
SIEPAKETTTNV

SEQ ID NO: 2765 - protein, 9 aa, Homo sapiens
SILEDPPSI

SEQ ID NO: 2766 - protein, 9 aa, Homo sapiens
SMTSLAQKI

SEQ ID NO: 2767 - protein, 8 aa, Homo sapiens
TLGEFLKL

SEQ ID NO: 2768 - protein, 9 aa, Homo sapiens
TVIYRIQAL

SEQ ID NO: 2769 - protein, 10 aa, Homo sapiens
VLFGGKVSGA

SEQ ID NO: 2770 - protein, 9 aa, Homo sapiens
VLYENALKL

SEQ ID NO: 2771 - protein, 9 aa, Homo sapiens
VMLDVPIRL

SEQ ID NO: 2772 - protein, 15 aa, Homo sapiens
GALNSVLTLMCMGAL

SEQ ID NO: 2773 - protein, 16 aa, Homo sapiens
GVAGIGILTGMCMGVG

SEQ ID NO: 2774 - protein, 15 aa, Homo sapiens
GVLNSVLTLMCMGVL

SEQ ID NO: 2775 - protein, 10 aa, Homo sapiens
LLFGLALIEV

SEQ ID NO: 2776 - protein, 15 aa, Homo sapiens
SAAGIGILTVMCMSA

SEQ ID NO: 2777 - protein, 14 aa, Homo sapiens
SLLNSVLTLMCMSL

SEQ ID NO: 2778 - protein, 9 aa, Hepatitis C virus subtype 1a
FLVGQLFTF

SEQ ID NO: 2779 - protein, 12 aa, Homo sapiens
ALADLDELLIRA

SEQ ID NO: 2780 - protein, 12 aa, Homo sapiens
ALADLIEKELSV

SEQ ID NO: 2781 - protein, 12 aa, Homo sapiens
ALFDGHGGPAAA

SEQ ID NO: 2782 - protein, 12 aa, Homo sapiens
ALFDQTRHSLAL

SEQ ID NO: 2783 - protein, 12 aa, Homo sapiens
ALIDEGETDWKL

SEQ ID NO: 2784 - protein, 12 aa, Homo sapiens
ALISLGEGLITA

SEQ ID NO: 2785 - protein, 12 aa, Homo sapiens
ALLDQALSNARL

SEQ ID NO: 2786 - protein, 12 aa, Homo sapiens
ALLEDLGKASGL

SEQ ID NO: 2787 - protein, 12 aa, Homo sapiens
ALLETPQRLFAL

SEQ ID NO: 2788 - protein, 12 aa, Homo sapiens
ALMDSLGPEWRL

SEQ ID NO: 2789 - protein, 12 aa, Homo sapiens
ALMDVGNMGQSV

SEQ ID NO: 2790 - protein, 12 aa, Homo sapiens
ALWDIETGQQTT

SEQ ID NO: 2791 - protein, 12 aa, Homo sapiens
ALWDLAADKQTL

SEQ ID NO: 2792 - protein, 12 aa, Homo sapiens
ALYDVGDIVHSV

SEQ ID NO: 2793 - protein, 12 aa, Homo sapiens
AMIDEGETDWKV

SEQ ID NO: 2794 - protein, 12 aa, Homo sapiens
AMLPDLQPLEKL

SEQ ID NO: 2795 - protein, 12 aa, Homo sapiens
AMVNIPEEMLRV

SEQ ID NO: 2796 - protein, 9 aa, Hepatitis C virus
CINGVVWTV

SEQ ID NO: 2797 - protein, 12 aa, Homo sapiens
FILDISPVAHRV

SEQ ID NO: 2798 - protein, 12 aa, Homo sapiens
FIMDDPAGNSYL

SEQ ID NO: 2799 - protein, 12 aa, Homo sapiens
FLADPDTVNHLL

SEQ ID NO: 2800 - protein, 12 aa, Homo sapiens
FLDELEDEAKAA

SEQ ID NO: 2801 - protein, 12 aa, Homo sapiens
FLDSMASGTLHL

SEQ ID NO: 2802 - protein, 12 aa, Homo sapiens
FLFQAGSGIYHV

SEQ ID NO: 2803 - protein, 12 aa, Homo sapiens
FLIEEQKIVVKV

SEQ ID NO: 2804 - protein, 12 aa, Homo sapiens
FLLQDSGRILQL

SEQ ID NO: 2805 - protein, 12 aa, Homo sapiens
FLNLMEKLNENI

SEQ ID NO: 2806 - protein, 12 aa, Homo sapiens
FLWAGGRASYGV

SEQ ID NO: 2807 - protein, 12 aa, Homo sapiens
FLYDEIEAEVNL

SEQ ID NO: 2808 - protein, 12 aa, Homo sapiens
FLYQQQGRLDKL

SEQ ID NO: 2809 - protein, 12 aa, Homo sapiens
FVILRKNPNYDL

SEQ ID NO: 2810 - protein, 12 aa, Homo sapiens
GLAPAEVVVATV

SEQ ID NO: 2811 - protein, 12 aa, Homo sapiens
GLFGGSSKIEEA

SEQ ID NO: 2812 - protein, 12 aa, Homo sapiens
GLLDPNVKSIFV

SEQ ID NO: 2813 - protein, 12 aa, Homo sapiens
GLLDQDTGLVLL

SEQ ID NO: 2814 - protein, 12 aa, Homo sapiens
GLVDDFEKKFNA

SEQ ID NO: 2815 - protein, 12 aa, Homo sapiens
HLWEVDVQGSKA

SEQ ID NO: 2816 - protein, 12 aa, Homo sapiens
ILFSEDSTKLFV

SEQ ID NO: 2817 - protein, 12 aa, Homo sapiens
ILLDGDKGKFLL

SEQ ID NO: 2818 - protein, 12 aa, Homo sapiens
ILMKDLADELAL

SEQ ID NO: 2819 - protein, 12 aa, Homo sapiens
KIFDIDEAEEGV

SEQ ID NO: 2820 - protein, 12 aa, Homo sapiens
KLADEVITRNEL

SEQ ID NO: 2821 - protein, 12 aa, Homo sapiens
KLFVDTDADTRL

SEQ ID NO: 2822 - protein, 12 aa, Homo sapiens
KLIDDQDISISL

SEQ ID NO: 2823 - protein, 14 aa, Homo sapiens
  misc_feature (13)..(13): Xaa can be any naturally occurring amino acid
KLIDLSQVMYLVXM

SEQ ID NO: 2824 - protein, 12 aa, Homo sapiens
KLIGDTPIDTFL

SEQ ID NO: 2825 - protein, 12 aa, Homo sapiens
KLIPQLPTLENL

SEQ ID NO: 2826 - protein, 12 aa, Homo sapiens
KLLDLETERILL

SEQ ID NO: 2827 - protein, 12 aa, Homo sapiens
KLLDPEDVAVQL

SEQ ID NO: 2828 - protein, 12 aa, Homo sapiens
KLLEGEEERLKL

SEQ ID NO: 2829 - protein, 12 aa, Homo sapiens
KLLEGEEERLRL

SEQ ID NO: 2830 - protein, 12 aa, Homo sapiens
KLLEGEESRISL

SEQ ID NO: 2831 - protein, 12 aa, Homo sapiens
KLLNQENIESEL

SEQ ID NO: 2832 - protein, 12 aa, Homo sapiens
KLMDLDVEQLGI

SEQ ID NO: 2833 - protein, 12 aa, Homo sapiens
KLMEVEKEKQEL

SEQ ID NO: 2834 - protein, 12 aa, Homo sapiens
KLMNVDPDSVVL

SEQ ID NO: 2835 - protein, 12 aa, Homo sapiens
KLQDLTDVQIMA

SEQ ID NO: 2836 - protein, 12 aa, Homo sapiens
KLSDIGEGIREV

SEQ ID NO: 2837 - protein, 12 aa, Homo sapiens
KLVSEKLASYQA

SEQ ID NO: 2838 - protein, 14 aa, Homo sapiens
  misc_feature (13)..(13): Xaa can be any naturally occurring amino acid
KLWDISEVMVGLXM

SEQ ID NO: 2839 - protein, 14 aa, Homo sapiens
  misc_feature (13)..(13): Xaa can be any naturally occurring amino acid
KLWEMDNMLIQIXM

SEQ ID NO: 2840 - protein, 12 aa, Homo sapiens
KLWEVSSGELLL

SEQ ID NO: 2841 - protein, 12 aa, Homo sapiens
KLYDIDVAKVNT

SEQ ID NO: 2842 - protein, 12 aa, Homo sapiens
KLYEIGAGTSEV

SEQ ID NO: 2843 - protein, 12 aa, Homo sapiens
KMFQEEGYIIAV

SEQ ID NO: 2844 - protein, 12 aa, Homo sapiens
KVWDLFPEADKV

SEQ ID NO: 2845 - protein, 12 aa, Homo sapiens
LLAGGSLAFILL

SEQ ID NO: 2846 - protein, 12 aa, Homo sapiens
LLLDPDTAVLKL

SEQ ID NO: 2847 - protein, 12 aa, Homo sapiens
LLLESDPKVYSL

SEQ ID NO: 2848 - protein, 12 aa, Homo sapiens
LLYDLADQLHAA

SEQ ID NO: 2849 - protein, 12 aa, Homo sapiens
LLYDLVTEKMFA

SEQ ID NO: 2850 - protein, 12 aa, Homo sapiens
LLYDQTKAPPFV

SEQ ID NO: 2851 - protein, 12 aa, Homo sapiens
LLYPLERGFIYV

SEQ ID NO: 2852 - protein, 12 aa, Homo sapiens
LMWELEKKSAVA

SEQ ID NO: 2853 - protein, 9 aa, Dengue virus 1
MVLALITFL

SEQ ID NO: 2854 - protein, 12 aa, Homo sapiens
NLDDENIRTSDV

SEQ ID NO: 2855 - protein, 12 aa, Homo sapiens
NLFDLGGQYLRV

SEQ ID NO: 2856 - protein, 12 aa, Homo sapiens
NLIDAGVDALRV

SEQ ID NO: 2857 - protein, 12 aa, Homo sapiens
NLIDLDDLYVHL

SEQ ID NO: 2858 - protein, 12 aa, Homo sapiens
NLLIDDKGTIKL

SEQ ID NO: 2859 - protein, 12 aa, Homo sapiens
QLWEYDPVKLTL

SEQ ID NO: 2860 - protein, 12 aa, Homo sapiens
RLAELTVDEFLA

SEQ ID NO: 2861 - protein, 12 aa, Homo sapiens
RLLDLENSLLGL

SEQ ID NO: 2862 - protein, 12 aa, Homo sapiens
RLLDMGETDLML

SEQ ID NO: 2863 - protein, 12 aa, Homo sapiens
RLLDSVEQDFHL

SEQ ID NO: 2864 - protein, 12 aa, Homo sapiens
RLLEITEGSEFL

SEQ ID NO: 2865 - protein, 12 aa, Homo sapiens
RLLPDTINSINL

SEQ ID NO: 2866 - protein, 12 aa, Homo sapiens
RLYDPTEGMVSV

SEQ ID NO: 2867 - protein, 12 aa, Homo sapiens
RLYDVPANSMRL

SEQ ID NO: 2868 - protein, 12 aa, Homo sapiens
RLYSEDELPAEF

SEQ ID NO: 2869 - protein, 12 aa, Homo sapiens
RMFDQQEIQVLI

SEQ ID NO: 2870 - protein, 12 aa, Homo sapiens
RVLDPSMVILEV

SEQ ID NO: 2871 - protein, 12 aa, Homo sapiens
SILEIQKGVFEV

SEQ ID NO: 2872 - protein, 12 aa, Homo sapiens
SLAELDEKISAL

SEQ ID NO: 2873 - protein, 12 aa, Homo sapiens
SLFDGFADGLGV

SEQ ID NO: 2874 - protein, 12 aa, Homo sapiens
SLFDYHDTRIHV

SEQ ID NO: 2875 - protein, 12 aa, Homo sapiens
SLFGNSGILENV

SEQ ID NO: 2876 - protein, 12 aa, Homo sapiens
SLLDENNVSSYL

SEQ ID NO: 2877 - protein, 12 aa, Homo sapiens
SLLDMSLVKLQL

SEQ ID NO: 2878 - protein, 12 aa, Homo sapiens
SLLEQGKEPWMV

SEQ ID NO: 2879 - protein, 12 aa, Homo sapiens
SLNDLEKDVMLL

SEQ ID NO: 2880 - protein, 12 aa, Homo sapiens
SLVDGRIIDTSL

SEQ ID NO: 2881 - protein, 12 aa, Homo sapiens
SLYDWNVKLLKV

SEQ ID NO: 2882 - protein, 12 aa, Homo sapiens
SQIDDLYSTIKV

SEQ ID NO: 2883 - protein, 12 aa, Homo sapiens
TLFDAETVALDA

SEQ ID NO: 2884 - protein, 12 aa, Homo sapiens
TLFDHAPDKLSV

SEQ ID NO: 2885 - protein, 12 aa, Homo sapiens
TLIDEDVYRLWL

SEQ ID NO: 2886 - protein, 12 aa, Homo sapiens
TLMEESGKMIFL

SEQ ID NO: 2887 - protein, 14 aa, Homo sapiens
  misc_feature (13)..(13): Xaa can be any naturally occurring amino acid
TLMQLLAVTVAVXM

SEQ ID NO: 2888 - protein, 12 aa, Homo sapiens
TLSDEHAGVISV

SEQ ID NO: 2889 - protein, 12 aa, Homo sapiens
TLWDIQKDLKDL

SEQ ID NO: 2890 - protein, 12 aa, Homo sapiens
VLAEINKEIEGV

SEQ ID NO: 2891 - protein, 12 aa, Homo sapiens
VLAEVAGILEPV

SEQ ID NO: 2892 - protein, 12 aa, Homo sapiens
VLFDSESIGIYV

SEQ ID NO: 2893 - protein, 12 aa, Homo sapiens
VLFNFGKEKFEV

SEQ ID NO: 2894 - protein, 12 aa, Homo sapiens
VLFNIDGQGNHV

SEQ ID NO: 2895 - protein, 12 aa, Homo sapiens
VLLDEESRPVNL

SEQ ID NO: 2896 - protein, 12 aa, Homo sapiens
VLLDLPSISSQV

SEQ ID NO: 2897 - protein, 14 aa, Homo sapiens
  misc_feature (13)..(13): Xaa can be any naturally occurring amino acid
VLLDVSAGQLLMXM

SEQ ID NO: 2898 - protein, 12 aa, Homo sapiens
VLLEAGEGLVTI

SEQ ID NO: 2899 - protein, 12 aa, Homo sapiens
VLLPQETAEIHL

SEQ ID NO: 2900 - protein, 12 aa, Homo sapiens
VLTLASNAIILI

SEQ ID NO: 2901 - protein, 12 aa, Homo sapiens
VLVDLPGVINTV

SEQ ID NO: 2902 - protein, 12 aa, Homo sapiens
VLVTEKGGLVEV

SEQ ID NO: 2903 - protein, 12 aa, Homo sapiens
VLWDRTFSLFQQ

SEQ ID NO: 2904 - protein, 12 aa, Homo sapiens
VLYNEEKQKMYM

SEQ ID NO: 2905 - protein, 14 aa, Homo sapiens
  misc_feature (13)..(13): Xaa can be any naturally occurring amino acid
YLFDVQRNNIAMXM

SEQ ID NO: 2906 - protein, 12 aa, Homo sapiens
YLFPEEFKAIYL

SEQ ID NO: 2907 - protein, 12 aa, Homo sapiens
YLIEPDVELQRI

SEQ ID NO: 2908 - protein, 12 aa, Homo sapiens
YLLDQPVLEQRL

SEQ ID NO: 2909 - protein, 12 aa, Homo sapiens
YLMDTSGKVVTA

SEQ ID NO: 2910 - protein, 12 aa, Homo sapiens
YLMEGSYNKVFL

SEQ ID NO: 2911 - protein, 12 aa, Homo sapiens
YLWDLDHGFAGV

SEQ ID NO: 2912 - protein, 12 aa, Homo sapiens
YPRDASPANTGL

SEQ ID NO: 2913 - protein, 12 aa, Homo sapiens
YVLEGKELEFYL

SEQ ID NO: 2914 - protein, 11 aa, Homo sapiens
RVAPEEHPVLL

SEQ ID NO: 2915 - protein, 9 aa, Homo sapiens
IIEPSLRQL

SEQ ID NO: 2916 - protein, 9 aa, Homo sapiens
IIFETPLRV

SEQ ID NO: 2917 - protein, 10 aa, Homo sapiens
KLADFGLARL

SEQ ID NO: 2918 - protein, 9 aa, Homo sapiens
RIMEFTTTL

SEQ ID NO: 2919 - protein, 11 aa, Homo sapiens
VILRKNPNYDL

SEQ ID NO: 2920 - protein, 10 aa, Homo sapiens
VLISLKQAPL

SEQ ID NO: 2921 - protein, 9 aa, Influenza A virus (A/Puerto Rico/8/1934(H1N1))
FLDIWTYNA

SEQ ID NO: 2922 - protein, 9 aa, Influenza A virus (A/Puerto Rico/8/1934(H1N1))
ILPDMTPSI

SEQ ID NO: 2923 - protein, 9 aa, Trypanosoma cruzi strain CL Brener
AAAGDKLSL

SEQ ID NO: 2924 - protein, 10 aa, Trypanosoma cruzi
ALQVTNHRYL

SEQ ID NO: 2925 - protein, 9 aa, Trypanosoma cruzi
ALRNLRVFL

SEQ ID NO: 2926 - protein, 10 aa, Trypanosoma cruzi
TVFDASRSTV

SEQ ID NO: 2927 - protein, 9 aa, Mycobacterium tuberculosis
AIIIAVLLV

SEQ ID NO: 2928 - protein, 9 aa, Mycobacterium tuberculosis
ALAIIIAVL

SEQ ID NO: 2929 - protein, 9 aa, Nocardia transvalensis
AAAPPPVRR

SEQ ID NO: 2930 - protein, 9 aa, Artificial Sequence
  unknown
ALFPQLVIL

SEQ ID NO: 2931 - protein, 9 aa, Artificial Sequence
  unknown
ALLPPINIL

SEQ ID NO: 2932 - protein, 11 aa, Artificial Sequence
  unknown
ILAPPVVKLLV

SEQ ID NO: 2933 - protein, 9 aa, Artificial Sequence
  unknown
KLIKPIVMK

SEQ ID NO: 2934 - protein, 9 aa, Artificial Sequence
  unknown
KQALKYFNL

SEQ ID NO: 2935 - protein, 11 aa, Homo sapiens
LLLDVPTAAVQ

SEQ ID NO: 2936 - protein, 8 aa, Homo sapiens
LLPAIVHI

SEQ ID NO: 2937 - protein, 12 aa, Homo sapiens
PGVTVKDVNQQE

SEQ ID NO: 2938 - protein, 9 aa, Homo sapiens
PQPDVFPLF

SEQ ID NO: 2939 - protein, 11 aa, Homo sapiens
RLPEVEVPQHL

SEQ ID NO: 2940 - protein, 9 aa, Artificial Sequence
  unknown
SLLGLLVEV

SEQ ID NO: 2941 - protein, 9 aa, Homo sapiens
SYIEHIFEI

SEQ ID NO: 2942 - protein, 9 aa, Artificial Sequence
  unknown
TLIKIQHTL

SEQ ID NO: 2943 - protein, 9 aa, Homo sapiens
TYLEKAIKI

SEQ ID NO: 2944 - protein, 11 aa, Homo sapiens
VLMTQQPRPVL

SEQ ID NO: 2945 - protein, 9 aa, Homo sapiens
VLPAFTSNL

SEQ ID NO: 2946 - protein, 9 aa, Homo sapiens
VLPKLYVKL

SEQ ID NO: 2947 - protein, 9 aa, Homo sapiens
VYSPHVLNL

SEQ ID NO: 2948 - protein, 9 aa, Mycobacterium tuberculosis H37Ra
AAAAGWQTL

SEQ ID NO: 2949 - protein, 10 aa, Mycobacterium tuberculosis H37Ra
ALAAATPMVV

SEQ ID NO: 2950 - protein, 9 aa, Mycobacterium tuberculosis H37Ra
ALAMEVYQA

SEQ ID NO: 2951 - protein, 9 aa, Mycobacterium tuberculosis H37Ra
ALDAQAVEL

SEQ ID NO: 2952 - protein, 9 aa, Mycobacterium tuberculosis H37Ra
ALTEMDYFI

SEQ ID NO: 2953 - protein, 9 aa, Mycobacterium tuberculosis H37Ra
AMPPELNTA

SEQ ID NO: 2954 - protein, 9 aa, Mycobacterium tuberculosis H37Ra
ELTARLNSL

SEQ ID NO: 2955 - protein, 10 aa, Mycobacterium tuberculosis H37Ra
FIRMWNQAAL

SEQ ID NO: 2956 - protein, 9 aa, Mycobacterium tuberculosis H37Ra
GINTIPIAL

SEQ ID NO: 2957 - protein, 9 aa, Mycobacterium tuberculosis H37Ra
KLEPMASIL

SEQ ID NO: 2958 - protein, 10 aa, Mycobacterium tuberculosis H37Ra
LIEKPVAPSV

SEQ ID NO: 2959 - protein, 10 aa, Mycobacterium tuberculosis H37Ra
LLRAESLPGA

SEQ ID NO: 2960 - protein, 10 aa, Mycobacterium tuberculosis H37Ra
QLPPAATQTL

SEQ ID NO: 2961 - protein, 10 aa, Mycobacterium tuberculosis H37Ra
SLPEIAANHI

SEQ ID NO: 2962 - protein, 9 aa, Human betaherpesvirus 5
LQTGIHVRV

SEQ ID NO: 2963 - protein, 9 aa, Hepatitis C virus
RLGPVQNEV

SEQ ID NO: 2964 - protein, 9 aa, Hepatitis C virus
WLGNIIMFA

SEQ ID NO: 2965 - protein, 11 aa, Homo sapiens
ALKRQGRTLYG

SEQ ID NO: 2966 - protein, 9 aa, Homo sapiens
ILQKNVPIL

SEQ ID NO: 2967 - protein, 9 aa, Homo sapiens
MRYVASYLL

SEQ ID NO: 2968 - protein, 9 aa, Homo sapiens
RVAPEEHPV

SEQ ID NO: 2969 - protein, 9 aa, Homo sapiens
TADPLDYRL

SEQ ID NO: 2970 - protein, 8 aa, Homo sapiens
VIDEPVRL

SEQ ID NO: 2971 - protein, 9 aa, Homo sapiens
YVDRVTEFL

SEQ ID NO: 2972 - protein, 9 aa, Homo sapiens
AMLERQFTV

SEQ ID NO: 2973 - protein, 9 aa, Homo sapiens
FLSSANEHL

SEQ ID NO: 2974 - protein, 10 aa, Human betaherpesvirus 5
KMMYMCYRNI

SEQ ID NO: 2975 - protein, 10 aa, Human betaherpesvirus 5
KQMWQARLTV

SEQ ID NO: 2976 - protein, 9 aa, Homo sapiens
MMYKDILLL

SEQ ID NO: 2977 - protein, 9 aa, Homo sapiens
RLLEAIIRL

SEQ ID NO: 2978 - protein, 9 aa, Homo sapiens
SLAAYIPRL

SEQ ID NO: 2979 - protein, 9 aa, Homo sapiens
SLQEKVAKA

SEQ ID NO: 2980 - protein, 9 aa, Homo sapiens
VLQNVAFSV

SEQ ID NO: 2981 - protein, 10 aa, Hepatitis C virus
KLVAAGINAV

SEQ ID NO: 2982 - protein, 10 aa, Hepatitis C virus
KLVACGINAV

SEQ ID NO: 2983 - protein, 10 aa, Hepatitis C virus
KLVADGINAV

SEQ ID NO: 2984 - protein, 10 aa, Hepatitis C virus
KLVAEGINAV

SEQ ID NO: 2985 - protein, 10 aa, Hepatitis C virus
KLVAFGINAV

SEQ ID NO: 2986 - protein, 10 aa, Hepatitis C virus
KLVAGGINAV

SEQ ID NO: 2987 - protein, 10 aa, Hepatitis C virus
KLVAHGINAV

SEQ ID NO: 2988 - protein, 10 aa, Hepatitis C virus
KLVAIGINAV

SEQ ID NO: 2989 - protein, 10 aa, Hepatitis C virus
KLVAKGINAV

SEQ ID NO: 2990 - protein, 10 aa, Hepatitis C virus
KLVANGINAV

SEQ ID NO: 2991 - protein, 10 aa, Hepatitis C virus
KLVAPGINAV

SEQ ID NO: 2992 - protein, 10 aa, Hepatitis C virus
KLVAQGINAV

SEQ ID NO: 2993 - protein, 10 aa, Hepatitis C virus
KLVARGINAV

SEQ ID NO: 2994 - protein, 10 aa, Hepatitis C virus
KLVASGINAV

SEQ ID NO: 2995 - protein, 10 aa, Hepatitis C virus
KLVATGINAV

SEQ ID NO: 2996 - protein, 10 aa, Hepatitis C virus
KLVAVGINAV

SEQ ID NO: 2997 - protein, 10 aa, Hepatitis C virus
KLVAWGINAV

SEQ ID NO: 2998 - protein, 10 aa, Hepatitis C virus
KLVAYGINAV

SEQ ID NO: 2999 - protein, 9 aa, Human immunodeficiency virus 1
YTAFTIPSV

SEQ ID NO: 3000 - protein, 9 aa, Homo sapiens
ALAPGLPTA

SEQ ID NO: 3001 - protein, 9 aa, Homo sapiens
DVHGPDWHL

SEQ ID NO: 3002 - protein, 10 aa, Homo sapiens
FVYDEPGHAV

SEQ ID NO: 3003 - protein, 9 aa, Homo sapiens
MLFPGSIAL

SEQ ID NO: 3004 - protein, 9 aa, Homo sapiens
MVAPAVASV

SEQ ID NO: 3005 - protein, 9 aa, Homo sapiens
NLLPKLHIV

SEQ ID NO: 3006 - protein, 9 aa, Homo sapiens
NVDPDNVVL

SEQ ID NO: 3007 - protein, 9 aa, Homo sapiens
SLASLLVSV

SEQ ID NO: 3008 - protein, 9 aa, Homo sapiens
SLLDPVPEV

SEQ ID NO: 3009 - protein, 9 aa, Homo sapiens
SLYGGTITI

SEQ ID NO: 3010 - protein, 9 aa, Homo sapiens
VLGTAIVEA

SEQ ID NO: 3011 - protein, 10 aa, Homo sapiens
FLVDGVCTVC

SEQ ID NO: 3012 - protein, 9 aa, Homo sapiens
KVVDVVRNL

SEQ ID NO: 3013 - protein, 12 aa, Homo sapiens
  misc_feature (11)..(11): Xaa can be any naturally occurring amino acid
LVLCLLSATVXC

SEQ ID NO: 3014 - protein, 15 aa, Homo sapiens
STCLLPHIEAVSCMC

SEQ ID NO: 3015 - protein, 15 aa, Homo sapiens
STCLVKIINEVSCMC

SEQ ID NO: 3016 - protein, 13 aa, Homo sapiens
  misc_feature (12)..(12): Xaa can be any naturally occurring amino acid
YLFDRNGVCLHXH

SEQ ID NO: 3017 - protein, 9 aa, Hepatitis C virus genotype 1
DLPLIIQRL

SEQ ID NO: 3018 - protein, 9 aa, Hepatitis C virus genotype 3
GILVLFGFF

SEQ ID NO: 3019 - protein, 9 aa, Hepatitis C virus genotype 3
IMGGELPTA

SEQ ID NO: 3020 - protein, 9 aa, Hepatitis C virus genotype 1
IMSGEVPSM

SEQ ID NO: 3021 - protein, 10 aa, Hepatitis C virus genotype 1
KLVALGLNAV

SEQ ID NO: 3022 - protein, 10 aa, Homo sapiens
QLFNKHTMFI

SEQ ID NO: 3023 - protein, 10 aa, Homo sapiens
LLLHCPSKTV

SEQ ID NO: 3024 - protein, 9 aa, Mycobacterium tuberculosis
YLRNFLAAP

SEQ ID NO: 3025 - protein, 10 aa, Hepatitis C virus genotype 1
QMAMIKLGAL

SEQ ID NO: 3026 - protein, 10 aa, Hepatitis C virus genotype 1
SSVSTALAEL

SEQ ID NO: 3027 - protein, 10 aa, Hepatitis C virus genotype 1
VLFGLMALTL

SEQ ID NO: 3028 - protein, 10 aa, Hepatitis C virus genotype 1
VLTESSVSTA

SEQ ID NO: 3029 - protein, 9 aa, Hepatitis C virus genotype 1
VVLFGLMAL

SEQ ID NO: 3030 - protein, 9 aa, Homo sapiens
HLAVERGKV

SEQ ID NO: 3031 - protein, 10 aa, Artificial Sequence
  unknown
LLMEHTMVAF

SEQ ID NO: 3032 - protein, 9 aa, Homo sapiens
RLASYLDRV

SEQ ID NO: 3033 - protein, 10 aa, Homo sapiens
TLFPGKVHSL

SEQ ID NO: 3034 - protein, 11 aa, Toxoplasma gondii ME49
VLFDKATYDKL

SEQ ID NO: 3035 - protein, 9 aa, Homo sapiens
FLMPFPVNY

SEQ ID NO: 3036 - protein, 12 aa, Homo sapiens
GKADGAEAKPAE

SEQ ID NO: 3037 - protein, 9 aa, Homo sapiens
GLWGHALLL

SEQ ID NO: 3038 - protein, 11 aa, Homo sapiens
HAVYRDDLKKL

SEQ ID NO: 3039 - protein, 10 aa, Homo sapiens
KIYDREQTRY

SEQ ID NO: 3040 - protein, 10 aa, Homo sapiens
LDTNADKQLS

SEQ ID NO: 3041 - protein, 9 aa, Homo sapiens
RMYELVHRM

SEQ ID NO: 3042 - protein, 10 aa, Homo sapiens
SLADAINTEF

SEQ ID NO: 3043 - protein, 9 aa, Homo sapiens
SLYEGIDFY

SEQ ID NO: 3044 - protein, 9 aa, Homo sapiens
YLLDHFLSM

SEQ ID NO: 3045 - protein, 11 aa, Homo sapiens
FTDEEGYGRYL

SEQ ID NO: 3046 - protein, 12 aa, Homo sapiens
QLERPGGLDTLY

SEQ ID NO: 3047 - protein, 9 aa, Homo sapiens
ALMELFPKL

SEQ ID NO: 3048 - protein, 12 aa, Homo sapiens
FILPDSLPLDTL

SEQ ID NO: 3049 - protein, 10 aa, Homo sapiens
GLIDSLVHYV

SEQ ID NO: 3050 - protein, 9 aa, Homo sapiens
LLIDDEYKV

SEQ ID NO: 3051 - protein, 11 aa, Homo sapiens
SLADDSVLERL

SEQ ID NO: 3052 - protein, 9 aa, Homo sapiens
SLLDLHTKV

SEQ ID NO: 3053 - protein, 11 aa, Homo sapiens
TIAEVGKWLQA

SEQ ID NO: 3054 - protein, 9 aa, Homo sapiens
TLFNVIKSV

SEQ ID NO: 3055 - protein, 12 aa, Homo sapiens
WQVKSGTIFDNF

SEQ ID NO: 3056 - protein, 9 aa, Homo sapiens
YYLNDLERI

SEQ ID NO: 3057 - protein, 10 aa, Human betaherpesvirus 5
QARLTVSGLA

SEQ ID NO: 3058 - protein, 9 aa, Homo sapiens
RQFPTPFQL

SEQ ID NO: 3059 - protein, 8 aa, Homo sapiens
VREIAQDF

SEQ ID NO: 3060 - protein, 10 aa, Homo sapiens
AGFAGDDAPR

SEQ ID NO: 3061 - protein, 11 aa, Homo sapiens
AGLAPYKLRPV

SEQ ID NO: 3062 - protein, 10 aa, Homo sapiens
AILEKSDFTM

SEQ ID NO: 3063 - protein, 9 aa, Homo sapiens
AILEKVFTA

SEQ ID NO: 3064 - protein, 9 aa, Homo sapiens
AIQDKLFQV

SEQ ID NO: 3065 - protein, 9 aa, Homo sapiens
ALAEEVEQV

SEQ ID NO: 3066 - protein, 9 aa, Homo sapiens
ALAPGVRAV

SEQ ID NO: 3067 - protein, 9 aa, Homo sapiens
ALDEVFTKV

SEQ ID NO: 3068 - protein, 11 aa, Homo sapiens
ALEEPDDQNRI

SEQ ID NO: 3069 - protein, 11 aa, Homo sapiens
ALFDEQHREEM

SEQ ID NO: 3070 - protein, 9 aa, Homo sapiens
ALFKEAYSL

SEQ ID NO: 3071 - protein, 9 aa, Homo sapiens
ALFQHITAL

SEQ ID NO: 3072 - protein, 8 aa, Homo sapiens
ALGFVYKL

SEQ ID NO: 3073 - protein, 9 aa, Homo sapiens
ALGHRLDIV

SEQ ID NO: 3074 - protein, 9 aa, Homo sapiens
ALHDHLATI

SEQ ID NO: 3075 - protein, 9 aa, Homo sapiens
ALHDRAPQL

SEQ ID NO: 3076 - protein, 9 aa, Homo sapiens
ALIEDEHNL

SEQ ID NO: 3077 - protein, 9 aa, Homo sapiens
ALKDFVASI

SEQ ID NO: 3078 - protein, 9 aa, Homo sapiens
ALLDNNIGL

SEQ ID NO: 3079 - protein, 10 aa, Homo sapiens
ALLEKGITEA

SEQ ID NO: 3080 - protein, 9 aa, Homo sapiens
ALLETNPYL

SEQ ID NO: 3081 - protein, 9 aa, Homo sapiens
ALLPLLERV

SEQ ID NO: 3082 - protein, 10 aa, Homo sapiens
ALMAHAMEEV

SEQ ID NO: 3083 - protein, 9 aa, Homo sapiens
ALMDQVHHM

SEQ ID NO: 3084 - protein, 9 aa, Homo sapiens
ALMEAVSHA

SEQ ID NO: 3085 - protein, 9 aa, Homo sapiens
ALMPVLNQV

SEQ ID NO: 3086 - protein, 10 aa, Homo sapiens
ALNPVANFHL

SEQ ID NO: 3087 - protein, 9 aa, Homo sapiens
ALPENPPAI

SEQ ID NO: 3088 - protein, 11 aa, Homo sapiens
ALPGDNVGFNV

SEQ ID NO: 3089 - protein, 9 aa, Homo sapiens
ALQDRVPLA

SEQ ID NO: 3090 - protein, 9 aa, Homo sapiens
ALSDHHVYL

SEQ ID NO: 3091 - protein, 9 aa, Homo sapiens
ALSDSIHTV

SEQ ID NO: 3092 - protein, 9 aa, Homo sapiens
ALSGHLETV

SEQ ID NO: 3093 - protein, 9 aa, Homo sapiens
ALTDFVRSV

SEQ ID NO: 3094 - protein, 10 aa, Homo sapiens
ALVDQRELYL

SEQ ID NO: 3095 - protein, 9 aa, Homo sapiens
ALYEQSLHI

SEQ ID NO: 3096 - protein, 9 aa, Homo sapiens
ALYSAEHGL

SEQ ID NO: 3097 - protein, 9 aa, Homo sapiens
AMAFITDHV

SEQ ID NO: 3098 - protein, 12 aa, Homo sapiens
AMFDQSQIQEFK

SEQ ID NO: 3099 - protein, 9 aa, Homo sapiens
ATDPTIHTV

SEQ ID NO: 3100 - protein, 9 aa, Homo sapiens
AVMLHSFTL

SEQ ID NO: 3101 - protein, 10 aa, Homo sapiens
DTNADKQLSF

SEQ ID NO: 3102 - protein, 12 aa, Homo sapiens
FFISEPLFKLSL

SEQ ID NO: 3103 - protein, 9 aa, Homo sapiens
FIAQKILAL

SEQ ID NO: 3104 - protein, 9 aa, Homo sapiens
FILEKEGYV

SEQ ID NO: 3105 - protein, 9 aa, Homo sapiens
FILPKEIAV

SEQ ID NO: 3106 - protein, 9 aa, Homo sapiens
FIMDRAQAL

SEQ ID NO: 3107 - protein, 9 aa, Homo sapiens
FLADIVQKL

SEQ ID NO: 3108 - protein, 9 aa, Homo sapiens
FLADNHHQV

SEQ ID NO: 3109 - protein, 10 aa, Homo sapiens
FLAEDALNTV

SEQ ID NO: 3110 - protein, 9 aa, Homo sapiens
FLAKLIAQA

SEQ ID NO: 3111 - protein, 10 aa, Homo sapiens
FLALLAGAHA

SEQ ID NO: 3112 - protein, 9 aa, Homo sapiens
FLDEKTHEL

SEQ ID NO: 3113 - protein, 11 aa, Homo sapiens
FLDESRSTQYM

SEQ ID NO: 3114 - protein, 10 aa, Homo sapiens
FLFDEEMEQM

SEQ ID NO: 3115 - protein, 9 aa, Homo sapiens
FLFNTENKL

SEQ ID NO: 3116 - protein, 9 aa, Homo sapiens
FLGPWPAAS

SEQ ID NO: 3117 - protein, 9 aa, Homo sapiens
FLGSNTPHV

SEQ ID NO: 3118 - protein, 9 aa, Homo sapiens
FLHEATVRL

SEQ ID NO: 3119 - protein, 9 aa, Homo sapiens
FLIQEIKTL

SEQ ID NO: 3120 - protein, 10 aa, Homo sapiens
FLLDGFPRTV

SEQ ID NO: 3121 - protein, 11 aa, Homo sapiens
FLLDKPQDLSI

SEQ ID NO: 3122 - protein, 11 aa, Homo sapiens
FLLEQEKTQAL

SEQ ID NO: 3123 - protein, 9 aa, Homo sapiens
FLMELEQPA

SEQ ID NO: 3124 - protein, 10 aa, Homo sapiens
FLNPDEVHAI

SEQ ID NO: 3125 - protein, 11 aa, Homo sapiens
FLPDPSALQNL

SEQ ID NO: 3126 - protein, 9 aa, Homo sapiens
FLQELNEKM

SEQ ID NO: 3127 - protein, 8 aa, Homo sapiens
FLSKTEEL

SEQ ID NO: 3128 - protein, 9 aa, Homo sapiens
FLSTSIAQL

SEQ ID NO: 3129 - protein, 9 aa, Homo sapiens
FLTDTSHLL

SEQ ID NO: 3130 - protein, 11 aa, Homo sapiens
FLWNGSGPQGL

SEQ ID NO: 3131 - protein, 9 aa, Artificial Sequence
  unknown
FLYDTHQDL

SEQ ID NO: 3132 - protein, 8 aa, Homo sapiens
FLYKVVQV

SEQ ID NO: 3133 - protein, 9 aa, Homo sapiens
FLYPFPLAL

SEQ ID NO: 3134 - protein, 10 aa, Homo sapiens
FLYPLVGTMS

SEQ ID NO: 3135 - protein, 12 aa, Homo sapiens
FMDEEEEDEIRV

SEQ ID NO: 3136 - protein, 9 aa, Homo sapiens
FMLNQNVML

SEQ ID NO: 3137 - protein, 9 aa, Homo sapiens
FMLTQPHSV

SEQ ID NO: 3138 - protein, 10 aa, Homo sapiens
FQAGSGIYHV

SEQ ID NO: 3139 - protein, 8 aa, Homo sapiens
FQAMNKEL

SEQ ID NO: 3140 - protein, 9 aa, Homo sapiens
FQHGVIAAV

SEQ ID NO: 3141 - protein, 9 aa, Homo sapiens
FQHTGIYSV

SEQ ID NO: 3142 - protein, 8 aa, Homo sapiens
FQSETKNL

SEQ ID NO: 3143 - protein, 10 aa, Homo sapiens
FVDKTVLPFV

SEQ ID NO: 3144 - protein, 9 aa, Homo sapiens
FVIETARQL

SEQ ID NO: 3145 - protein, 11 aa, Homo sapiens
FVLKTPSAAYL

SEQ ID NO: 3146 - protein, 11 aa, Homo sapiens
GIAEEPEIQMV

SEQ ID NO: 3147 - protein, 12 aa, Homo sapiens
GIVEFSGKPAAR

SEQ ID NO: 3148 - protein, 9 aa, Homo sapiens
GLAEDSPKM

SEQ ID NO: 3149 - protein, 9 aa, Homo sapiens
GLAERISVL

SEQ ID NO: 3150 - protein, 9 aa, Homo sapiens
GLAKAVASV

SEQ ID NO: 3151 - protein, 9 aa, Homo sapiens
GLAKSIHHA

SEQ ID NO: 3152 - protein, 10 aa, Homo sapiens
GLALQGIYKA

SEQ ID NO: 3153 - protein, 10 aa, Homo sapiens
GLAPYKLRPV

SEQ ID NO: 3154 - protein, 9 aa, Homo sapiens
GLFPAPIHV

SEQ ID NO: 3155 - protein, 9 aa, Homo sapiens
GLGQLGFHV

SEQ ID NO: 3156 - protein, 9 aa, Homo sapiens
GLIDHQTYL

SEQ ID NO: 3157 - protein, 11 aa, Homo sapiens
GLIDTKELEPL

SEQ ID NO: 3158 - protein, 10 aa, Homo sapiens
GLIGVGLINV

SEQ ID NO: 3159 - protein, 9 aa, Homo sapiens
GLKEGIPAL

SEQ ID NO: 3160 - protein, 9 aa, Homo sapiens
GLKNGVPAV

SEQ ID NO: 3161 - protein, 11 aa, Homo sapiens
GLLDNDEIMAL

SEQ ID NO: 3162 - protein, 9 aa, Homo sapiens
GLLGVTQQL

SEQ ID NO: 3163 - protein, 10 aa, Homo sapiens
GLLQPPVRIV

SEQ ID NO: 3164 - protein, 9 aa, Homo sapiens
GLLTEIRAV

SEQ ID NO: 3165 - protein, 9 aa, Homo sapiens
GLMADPMKV

SEQ ID NO: 3166 - protein, 9 aa, Homo sapiens
GLNDFIQKI

SEQ ID NO: 3167 - protein, 9 aa, Homo sapiens
GLNDRSDAV

SEQ ID NO: 3168 - protein, 9 aa, Homo sapiens
GLQEAQYRL

SEQ ID NO: 3169 - protein, 9 aa, Homo sapiens
GLQEHSISV

SEQ ID NO: 3170 - protein, 9 aa, Homo sapiens
GLTEALHFV

SEQ ID NO: 3171 - protein, 9 aa, Homo sapiens
GLTPHLTMV

SEQ ID NO: 3172 - protein, 11 aa, Homo sapiens
GLTSTDLLFHL

SEQ ID NO: 3173 - protein, 11 aa, Homo sapiens
GLVDEKALAQA

SEQ ID NO: 3174 - protein, 10 aa, Homo sapiens
GLVKEGLVMV

SEQ ID NO: 3175 - protein, 11 aa, Homo sapiens
GLWEIENNPTV

SEQ ID NO: 3176 - protein, 11 aa, Homo sapiens
GLYSLSSVVTV

SEQ ID NO: 3177 - protein, 9 aa, Homo sapiens
GVYGDVHRV

SEQ ID NO: 3178 - protein, 9 aa, Homo sapiens
HLAPRTPEV

SEQ ID NO: 3179 - protein, 9 aa, Homo sapiens
HLGPEGRSV

SEQ ID NO: 3180 - protein, 9 aa, Homo sapiens
HLLHTVPAL

SEQ ID NO: 3181 - protein, 9 aa, Homo sapiens
HLNPHTNMV

SEQ ID NO: 3182 - protein, 9 aa, Homo sapiens
HLWTGEEQL

SEQ ID NO: 3183 - protein, 9 aa, Homo sapiens
HVLDVIHEV

SEQ ID NO: 3184 - protein, 10 aa, Homo sapiens
IAVGYVDDTQ

SEQ ID NO: 3185 - protein, 9 aa, Homo sapiens
IIDQHTFEV

SEQ ID NO: 3186 - protein, 9 aa, Homo sapiens
IILDEAHNV

SEQ ID NO: 3187 - protein, 9 aa, Homo sapiens
IILGKSHYV

SEQ ID NO: 3188 - protein, 10 aa, Homo sapiens
IKKIGYNPDT

SEQ ID NO: 3189 - protein, 12 aa, Homo sapiens
IKKIGYNPDTVA

SEQ ID NO: 3190 - protein, 11 aa, Homo sapiens
ILAELPEDFKA

SEQ ID NO: 3191 - protein, 11 aa, Homo sapiens
ILAPAGSLPKI

SEQ ID NO: 3192 - protein, 9 aa, Homo sapiens
ILATNTQKV

SEQ ID NO: 3193 - protein, 11 aa, Homo sapiens
ILENPPEEMKL

SEQ ID NO: 3194 - protein, 9 aa, Homo sapiens
ILIDKTSFV

SEQ ID NO: 3195 - protein, 9 aa, Homo sapiens
ILIDPIRVV

SEQ ID NO: 3196 - protein, 9 aa, Homo sapiens
ILLAEVPTM

SEQ ID NO: 3197 - protein, 9 aa, Homo sapiens
ILQPHVIAL

SEQ ID NO: 3198 - protein, 9 aa, Homo sapiens
ILQTKLYTL

SEQ ID NO: 3199 - protein, 11 aa, Toxoplasma gondii ME49
IMQLLRDNLTL

SEQ ID NO: 3200 - protein, 9 aa, Homo sapiens
IMYDQNHLL

SEQ ID NO: 3201 - protein, 10 aa, Homo sapiens
INDPFIDLNY

SEQ ID NO: 3202 - protein, 11 aa, Homo sapiens
IQDNHDGTYTV

SEQ ID NO: 3203 - protein, 9 aa, Homo sapiens
IQSSHNFQL

SEQ ID NO: 3204 - protein, 9 aa, Homo sapiens
IQVTKVTQV

SEQ ID NO: 3205 - protein, 9 aa, Homo sapiens
IRKLPFQRL

SEQ ID NO: 3206 - protein, 9 aa, Homo sapiens
IVDRPVTLV

SEQ ID NO: 3207 - protein, 9 aa, Homo sapiens
KFWESPETV

SEQ ID NO: 3208 - protein, 9 aa, Homo sapiens
KIAPNTPQL

SEQ ID NO: 3209 - protein, 9 aa, Homo sapiens
KILPTLEAV

SEQ ID NO: 3210 - protein, 9 aa, Homo sapiens
KIQEILTQV

SEQ ID NO: 3211 - protein, 10 aa, Homo sapiens
KIWDVSVNSV

SEQ ID NO: 3212 - protein, 9 aa, Homo sapiens
KIYEKTFTL

SEQ ID NO: 3213 - protein, 9 aa, Homo sapiens
KLADAKIFL

SEQ ID NO: 3214 - protein, 9 aa, Homo sapiens
KLADQYPHL

SEQ ID NO: 3215 - protein, 9 aa, Homo sapiens
KLDAFVEGV

SEQ ID NO: 3216 - protein, 9 aa, Homo sapiens
KLFGETTLV

SEQ ID NO: 3217 - protein, 9 aa, Homo sapiens
KLFIGGLNV

SEQ ID NO: 3218 - protein, 10 aa, Homo sapiens
KLGDFGLATV

SEQ ID NO: 3219 - protein, 9 aa, Homo sapiens
KLGNAPAEV

SEQ ID NO: 3220 - protein, 9 aa, Homo sapiens
KLGSVPVTV

SEQ ID NO: 3221 - protein, 9 aa, Homo sapiens
KLHYVVTEV

SEQ ID NO: 3222 - protein, 11 aa, Homo sapiens
KLIDETQDMLL

SEQ ID NO: 3223 - protein, 9 aa, Homo sapiens
KLIEEVHAV

SEQ ID NO: 3224 - protein, 9 aa, Homo sapiens
KLIESTSTM

SEQ ID NO: 3225 - protein, 9 aa, Homo sapiens
KLIKSLEAA

SEQ ID NO: 3226 - protein, 10 aa, Homo sapiens
KLLDPEDISV

SEQ ID NO: 3227 - protein, 9 aa, Homo sapiens
KLLGELHTL

SEQ ID NO: 3228 - protein, 9 aa, Homo sapiens
KLLGKVTIA

SEQ ID NO: 3229 - protein, 9 aa, Homo sapiens
KLLGNIKNV

SEQ ID NO: 3230 - protein, 9 aa, Homo sapiens
KLLQFYPSL

SEQ ID NO: 3231 - protein, 9 aa, Homo sapiens
KLLSKTPEL

SEQ ID NO: 3232 - protein, 9 aa, Homo sapiens
KLMGQIHQL

SEQ ID NO: 3233 - protein, 9 aa, Homo sapiens
KLNPGIAYV

SEQ ID NO: 3234 - protein, 9 aa, Homo sapiens
KLQARVVEV

SEQ ID NO: 3235 - protein, 9 aa, Homo sapiens
KLQEFLQTL

SEQ ID NO: 3236 - protein, 9 aa, Homo sapiens
KLQELEARV

SEQ ID NO: 3237 - protein, 9 aa, Homo sapiens
KLSEIPLTL

SEQ ID NO: 3238 - protein, 9 aa, Homo sapiens
KLVEYIVKA

SEQ ID NO: 3239 - protein, 9 aa, Homo sapiens
KLYHNEVEI

SEQ ID NO: 3240 - protein, 9 aa, Homo sapiens
KLYQTPLEL

SEQ ID NO: 3241 - protein, 9 aa, Homo sapiens
KLYSISSQV

SEQ ID NO: 3242 - protein, 9 aa, Homo sapiens
KLYTTAHHL

SEQ ID NO: 3243 - protein, 9 aa, Homo sapiens
KMADIEYRL

SEQ ID NO: 3244 - protein, 9 aa, Homo sapiens
KMLERIPEA

SEQ ID NO: 3245 - protein, 12 aa, Homo sapiens
KMVGDVTGAQAY

SEQ ID NO: 3246 - protein, 11 aa, Homo sapiens
KMWDPHNDPNA

SEQ ID NO: 3247 - protein, 9 aa, Homo sapiens
KQHGVNVSV

SEQ ID NO: 3248 - protein, 9 aa, Homo sapiens
KQISQAYEV

SEQ ID NO: 3249 - protein, 10 aa, Homo sapiens
KQMEQISQFL

SEQ ID NO: 3250 - protein, 9 aa, Homo sapiens
KQYGNEVFL

SEQ ID NO: 3251 - protein, 9 aa, Homo sapiens
KTWGGVVTA

SEQ ID NO: 3252 - protein, 9 aa, Homo sapiens
KVAPAPAVV

SEQ ID NO: 3253 - protein, 9 aa, Homo sapiens
KVFGNEIKL

SEQ ID NO: 3254 - protein, 9 aa, Homo sapiens
KVIDEIYRV

SEQ ID NO: 3255 - protein, 9 aa, Homo sapiens
KVIDGLETL

SEQ ID NO: 3256 - protein, 11 aa, Homo sapiens
KVKVNKDDIQK

SEQ ID NO: 3257 - protein, 9 aa, Homo sapiens
KVLGALLFV

SEQ ID NO: 3258 - protein, 10 aa, Homo sapiens
KVMDLSIVRL

SEQ ID NO: 3259 - protein, 9 aa, Homo sapiens
KVTHAVVTV

SEQ ID NO: 3260 - protein, 9 aa, Homo sapiens
KVVALVHAV

SEQ ID NO: 3261 - protein, 9 aa, Homo sapiens
LDTNADKQL

SEQ ID NO: 3262 - protein, 10 aa, Homo sapiens
LIMGFLVLGL

SEQ ID NO: 3263 - protein, 10 aa, Homo sapiens
LIRKLPFQRL

SEQ ID NO: 3264 - protein, 11 aa, Homo sapiens
LLADIGGDPFA

SEQ ID NO: 3265 - protein, 9 aa, Homo sapiens
LLANKVPAA

SEQ ID NO: 3266 - protein, 9 aa, Homo sapiens
LLAPVVKEI

SEQ ID NO: 3267 - protein, 9 aa, Homo sapiens
LLDPSVFHV

SEQ ID NO: 3268 - protein, 9 aa, Homo sapiens
LLEPFVHQV

SEQ ID NO: 3269 - protein, 9 aa, Homo sapiens
LLFDQAYQM

SEQ ID NO: 3270 - protein, 9 aa, Homo sapiens
LLFPESIRV

SEQ ID NO: 3271 - protein, 9 aa, Homo sapiens
LLFSAFSRA

SEQ ID NO: 3272 - protein, 11 aa, Homo sapiens
LLKEVDNLYNI

SEQ ID NO: 3273 - protein, 9 aa, Homo sapiens
LLLAAPAQA

SEQ ID NO: 3274 - protein, 9 aa, Homo sapiens
LLLAQLSDA

SEQ ID NO: 3275 - protein, 9 aa, Homo sapiens
LLLDMQNRL

SEQ ID NO: 3276 - protein, 9 aa, Homo sapiens
LLNDNIFHM

SEQ ID NO: 3277 - protein, 9 aa, Homo sapiens
LLWVPGCFA

SEQ ID NO: 3278 - protein, 10 aa, Homo sapiens
LLYDDKGVGL

SEQ ID NO: 3279 - protein, 9 aa, Homo sapiens
LLYGSIPKA

SEQ ID NO: 3280 - protein, 11 aa, Homo sapiens
LLYQEGAKMAV

SEQ ID NO: 3281 - protein, 9 aa, Homo sapiens
LMISRTPEV

SEQ ID NO: 3282 - protein, 10 aa, Homo sapiens
LMLDVEEDRL

SEQ ID NO: 3283 - protein, 9 aa, Homo sapiens
LQFDGIHVV

SEQ ID NO: 3284 - protein, 12 aa, Homo sapiens
LTEAPLNPKANR

SEQ ID NO: 3285 - protein, 9 aa, Homo sapiens
MLLDVMHTV

SEQ ID NO: 3286 - protein, 11 aa, Homo sapiens
MLLGNPGLVFS

SEQ ID NO: 3287 - protein, 9 aa, Homo sapiens
MLPPPPLTA

SEQ ID NO: 3288 - protein, 12 aa, Homo sapiens
MLTELEKALNSI

SEQ ID NO: 3289 - protein, 11 aa, Homo sapiens
MQWGQLLDHDL

SEQ ID NO: 3290 - protein, 10 aa, Homo sapiens
MTFLRHRLFL

SEQ ID NO: 3291 - protein, 8 aa, Homo sapiens
MVFKLAQA

SEQ ID NO: 3292 - protein, 9 aa, Homo sapiens
NIIEKLQDV

SEQ ID NO: 3293 - protein, 11 aa, Homo sapiens
NLFGGEPLSYT

SEQ ID NO: 3294 - protein, 9 aa, Homo sapiens
NLQVTQPTV

SEQ ID NO: 3295 - protein, 9 aa, Homo sapiens
NMLEAVHTI

SEQ ID NO: 3296 - protein, 12 aa, Homo sapiens
NSIIDVYHKYSL

SEQ ID NO: 3297 - protein, 9 aa, Homo sapiens
PEVAECFDE

SEQ ID NO: 3298 - protein, 9 aa, Homo sapiens
QLIEKITQV

SEQ ID NO: 3299 - protein, 9 aa, Homo sapiens
RISDVHFSV

SEQ ID NO: 3300 - protein, 9 aa, Homo sapiens
RLASTLVHL

SEQ ID NO: 3301 - protein, 9 aa, Homo sapiens
RLFESSQYL

SEQ ID NO: 3302 - protein, 9 aa, Homo sapiens
RLIQESPTL

SEQ ID NO: 3303 - protein, 9 aa, Homo sapiens
RLQDELVTL

SEQ ID NO: 3304 - protein, 9 aa, Homo sapiens
RLQEFIDEV

SEQ ID NO: 3305 - protein, 9 aa, Homo sapiens
RLQEKVESA

SEQ ID NO: 3306 - protein, 9 aa, Homo sapiens
RLQEVTHSV

SEQ ID NO: 3307 - protein, 9 aa, Homo sapiens
RLSSVNAEV

SEQ ID NO: 3308 - protein, 9 aa, Homo sapiens
RLTQTVAHL

SEQ ID NO: 3309 - protein, 9 aa, Homo sapiens
RLYDKFAEA

SEQ ID NO: 3310 - protein, 10 aa, Homo sapiens
RLYGPSSVSF

SEQ ID NO: 3311 - protein, 9 aa, Homo sapiens
RLYQGINQL

SEQ ID NO: 3312 - protein, 9 aa, Homo sapiens
RMIDIQTRM

SEQ ID NO: 3313 - protein, 9 aa, Homo sapiens
RMWEDPMGA

SEQ ID NO: 3314 - protein, 12 aa, Homo sapiens
RVAPEEHPVLLT

SEQ ID NO: 3315 - protein, 9 aa, Homo sapiens
RVDKNAPTV

SEQ ID NO: 3316 - protein, 9 aa, Homo sapiens
RVFENIVAV

SEQ ID NO: 3317 - protein, 9 aa, Homo sapiens
RVIGTLEEV

SEQ ID NO: 3318 - protein, 9 aa, Homo sapiens
SIAAVLPKV

SEQ ID NO: 3319 - protein, 9 aa, Homo sapiens
SLAQYLINV

SEQ ID NO: 3320 - protein, 9 aa, Homo sapiens
SLASHIQSL

SEQ ID NO: 3321 - protein, 12 aa, Homo sapiens
SLASPSRAASQL

SEQ ID NO: 3322 - protein, 9 aa, Homo sapiens
SLDAKEIYL

SEQ ID NO: 3323 - protein, 9 aa, Homo sapiens
SLDQPTQTV

SEQ ID NO: 3324 - protein, 9 aa, Homo sapiens
SLIEQTTAL

SEQ ID NO: 3325 - protein, 9 aa, Homo sapiens
SLIKQIPRI

SEQ ID NO: 3326 - protein, 9 aa, Homo sapiens
SLLDDLHSA

SEQ ID NO: 3327 - protein, 11 aa, Homo sapiens
SLLESNKDLLL

SEQ ID NO: 3328 - protein, 10 aa, Homo sapiens
SLLPEGPPAI

SEQ ID NO: 3329 - protein, 9 aa, Homo sapiens
SLLPTSPRL

SEQ ID NO: 3330 - protein, 10 aa, Homo sapiens
SLLQDGEFSM

SEQ ID NO: 3331 - protein, 9 aa, Homo sapiens
SLLSELQHA

SEQ ID NO: 3332 - protein, 9 aa, Homo sapiens
SLLSQQPFL

SEQ ID NO: 3333 - protein, 10 aa, Homo sapiens
SLMQAPLLIA

SEQ ID NO: 3334 - protein, 9 aa, Homo sapiens
SLNHFTHSV

SEQ ID NO: 3335 - protein, 9 aa, Homo sapiens
SLSPIYPAA

SEQ ID NO: 3336 - protein, 9 aa, Homo sapiens
SLTGRLDEV

SEQ ID NO: 3337 - protein, 9 aa, Homo sapiens
SLVEQLTMV

SEQ ID NO: 3338 - protein, 9 aa, Homo sapiens
SLVSSLYKV

SEQ ID NO: 3339 - protein, 9 aa, Homo sapiens
SLWPSPEQL

SEQ ID NO: 3340 - protein, 10 aa, Homo sapiens
SLYEGIDFYT

SEQ ID NO: 3341 - protein, 12 aa, Homo sapiens
SMFDQSQIQEFK

SEQ ID NO: 3342 - protein, 9 aa, Homo sapiens
SMMQTLLTV

SEQ ID NO: 3343 - protein, 9 aa, Homo sapiens
SQTFVNPHV

SEQ ID NO: 3344 - protein, 9 aa, Homo sapiens
SQWDSPMRV

SEQ ID NO: 3345 - protein, 9 aa, Homo sapiens
TADEVHYFL

SEQ ID NO: 3346 - protein, 9 aa, Homo sapiens
TLAETLVNL

SEQ ID NO: 3347 - protein, 9 aa, Homo sapiens
TLASIIKEV

SEQ ID NO: 3348 - protein, 9 aa, Homo sapiens
TLASSLHTL

SEQ ID NO: 3349 - protein, 9 aa, Homo sapiens
TLFPSKIGV

SEQ ID NO: 3350 - protein, 9 aa, Homo sapiens
TLGSTVFRV

SEQ ID NO: 3351 - protein, 9 aa, Homo sapiens
TLISRLPAV

SEQ ID NO: 3352 - protein, 9 aa, Homo sapiens
TLMAEMHVV

SEQ ID NO: 3353 - protein, 9 aa, Homo sapiens
TLMDILPRI

SEQ ID NO: 3354 - protein, 9 aa, Homo sapiens
TLMEALHYM

SEQ ID NO: 3355 - protein, 9 aa, Homo sapiens
TLPEVAECF

SEQ ID NO: 3356 - protein, 9 aa, Homo sapiens
TLQEQIEAI

SEQ ID NO: 3357 - protein, 9 aa, Homo sapiens
TLVDEVFRI

SEQ ID NO: 3358 - protein, 9 aa, Homo sapiens
TLVDFDNHL

SEQ ID NO: 3359 - protein, 9 aa, Homo sapiens
TLWPEVQKL

SEQ ID NO: 3360 - protein, 9 aa, Homo sapiens
TLYDHVDEV

SEQ ID NO: 3361 - protein, 9 aa, Homo sapiens
TLYRIFNNK

SEQ ID NO: 3362 - protein, 9 aa, Homo sapiens
TVAEKVDAV

SEQ ID NO: 3363 - protein, 9 aa, Homo sapiens
TVFEHTFHV

SEQ ID NO: 3364 - protein, 9 aa, Homo sapiens
TVLEKVYEL

SEQ ID NO: 3365 - protein, 11 aa, Homo sapiens
VELDDLGKDEL

SEQ ID NO: 3366 - protein, 9 aa, Homo sapiens
VIAEILRGV

SEQ ID NO: 3367 - protein, 9 aa, Homo sapiens
VIDGHIYAV

SEQ ID NO: 3368 - protein, 9 aa, Homo sapiens
VIDQKVYEI

SEQ ID NO: 3369 - protein, 9 aa, Homo sapiens
VIYPARISL

SEQ ID NO: 3370 - protein, 10 aa, Homo sapiens
VKVNKDDIQK

SEQ ID NO: 3371 - protein, 9 aa, Homo sapiens
VLAEKLAAI

SEQ ID NO: 3372 - protein, 9 aa, Homo sapiens
VLDDSTAKL

SEQ ID NO: 3373 - protein, 11 aa, Homo sapiens
VLEGKELEFYL

SEQ ID NO: 3374 - protein, 9 aa, Homo sapiens
VLHEGTNFV

SEQ ID NO: 3375 - protein, 10 aa, Homo sapiens
VLLAAGPSAA

SEQ ID NO: 3376 - protein, 9 aa, Homo sapiens
VLLDHLSLA

SEQ ID NO: 3377 - protein, 11 aa, Homo sapiens
VLLEQEKTFFT

SEQ ID NO: 3378 - protein, 10 aa, Homo sapiens
VLLEQPTWQL

SEQ ID NO: 3379 - protein, 9 aa, Homo sapiens
VLLFIEHSV

SEQ ID NO: 3380 - protein, 9 aa, Homo sapiens
VLTEHVAAA

SEQ ID NO: 3381 - protein, 11 aa, Homo sapiens
VLVEPDAGAGV

SEQ ID NO: 3382 - protein, 10 aa, Homo sapiens
VLYPASPHGV

SEQ ID NO: 3383 - protein, 9 aa, Homo sapiens
VLYSIAEKV

SEQ ID NO: 3384 - protein, 9 aa, Homo sapiens
VMLQINPKL

SEQ ID NO: 3385 - protein, 9 aa, Homo sapiens
VMQDIVYKL

SEQ ID NO: 3386 - protein, 11 aa, Homo sapiens
VMQDPEFLQSV

SEQ ID NO: 3387 - protein, 11 aa, Homo sapiens
VNLPINGNGKQ

SEQ ID NO: 3388 - protein, 9 aa, Homo sapiens
VVDAGKVTL

SEQ ID NO: 3389 - protein, 9 aa, Homo sapiens
VVLSYVKEI

SEQ ID NO: 3390 - protein, 9 aa, Homo sapiens
VVMNVVHQL

SEQ ID NO: 3391 - protein, 9 aa, Homo sapiens
VVNDRSWKV

SEQ ID NO: 3392 - protein, 9 aa, Homo sapiens
VVVEYLRAV

SEQ ID NO: 3393 - protein, 9 aa, Homo sapiens
WLTKVSQPA

SEQ ID NO: 3394 - protein, 10 aa, Homo sapiens
YALPHAILRL

SEQ ID NO: 3395 - protein, 10 aa, Homo sapiens
YAYDGKDYLA

SEQ ID NO: 3396 - protein, 11 aa, Homo sapiens
YAYDGKDYLAL

SEQ ID NO: 3397 - protein, 11 aa, Homo sapiens
YGAEALERMFL

SEQ ID NO: 3398 - protein, 11 aa, Homo sapiens
YIFPLDDKAAV

SEQ ID NO: 3399 - protein, 11 aa, Homo sapiens
YLLEQTPEQQA

SEQ ID NO: 3400 - protein, 9 aa, Homo sapiens
YLLTHLPAV

SEQ ID NO: 3401 - protein, 9 aa, Homo sapiens
YLQDYTDRV

SEQ ID NO: 3402 - protein, 9 aa, Homo sapiens
YLQEIQTQL

SEQ ID NO: 3403 - protein, 9 aa, Homo sapiens
YLRPPNTSL

SEQ ID NO: 3404 - protein, 11 aa, Homo sapiens
YLYESGETEKL

SEQ ID NO: 3405 - protein, 8 aa, Homo sapiens
YQSKYEEL

SEQ ID NO: 3406 - protein, 8 aa, Homo sapiens
YQTKYEEL

SEQ ID NO: 3407 - protein, 9 aa, Homo sapiens
YSDDIPHAL

SEQ ID NO: 3408 - protein, 10 aa, Homo sapiens
YVFENTVATV

SEQ ID NO: 3409 - protein, 9 aa, Homo sapiens
AAAPVVPAV

SEQ ID NO: 3410 - protein, 9 aa, Homo sapiens
AALPNVYEV

SEQ ID NO: 3411 - protein, 9 aa, Homo sapiens
AIAPIIAAV

SEQ ID NO: 3412 - protein, 10 aa, Homo sapiens
AIDPHLLLSV

SEQ ID NO: 3413 - protein, 9 aa, Homo sapiens
AIIESTPEL

SEQ ID NO: 3414 - protein, 9 aa, Homo sapiens
AIIEYMPLL

SEQ ID NO: 3415 - protein, 9 aa, Homo sapiens
AIISELVSI

SEQ ID NO: 3416 - protein, 9 aa, Homo sapiens
AILGPTFTL

SEQ ID NO: 3417 - protein, 9 aa, Homo sapiens
AILTTLIHL

SEQ ID NO: 3418 - protein, 9 aa, Homo sapiens
AINPKLLQL

SEQ ID NO: 3419 - protein, 9 aa, Homo sapiens
ALAEALKEV

SEQ ID NO: 3420 - protein, 10 aa, Homo sapiens
ALALIYNEAL

SEQ ID NO: 3421 - protein, 9 aa, Homo sapiens
ALANQIPTV

SEQ ID NO: 3422 - protein, 11 aa, Homo sapiens
ALAPSTMKIKI

SEQ ID NO: 3423 - protein, 9 aa, Homo sapiens
ALASHLIEA

SEQ ID NO: 3424 - protein, 9 aa, Homo sapiens
ALASLIRSV

SEQ ID NO: 3425 - protein, 9 aa, Homo sapiens
ALASVIMGL

SEQ ID NO: 3426 - protein, 9 aa, Homo sapiens
ALDEKLLNI

SEQ ID NO: 3427 - protein, 10 aa, Homo sapiens
ALDESHNQNL

SEQ ID NO: 3428 - protein, 12 aa, Homo sapiens
ALDFEQEMATAA

SEQ ID NO: 3429 - protein, 10 aa, Homo sapiens
ALDPAAQAFL

SEQ ID NO: 3430 - protein, 11 aa, Homo sapiens
ALDPLADKILI

SEQ ID NO: 3431 - protein, 9 aa, Homo sapiens
ALDPNIATL

SEQ ID NO: 3432 - protein, 9 aa, Homo sapiens
ALDSTNVEA

SEQ ID NO: 3433 - protein, 9 aa, Homo sapiens
ALDTINILL

SEQ ID NO: 3434 - protein, 9 aa, Homo sapiens
ALDTNQVLL

SEQ ID NO: 3435 - protein, 11 aa, Homo sapiens
ALFARPDLLLL

SEQ ID NO: 3436 - protein, 9 aa, Homo sapiens
ALFEEVPEL

SEQ ID NO: 3437 - protein, 11 aa, Homo sapiens
ALFEQKGPVYV

SEQ ID NO: 3438 - protein, 9 aa, Homo sapiens
ALFGTILEL

SEQ ID NO: 3439 - protein, 10 aa, Homo sapiens
ALFPAPLAQI

SEQ ID NO: 3440 - protein, 9 aa, Homo sapiens
ALFPGVALL

SEQ ID NO: 3441 - protein, 11 aa, Homo sapiens
ALFPHLLQPVL

SEQ ID NO: 3442 - protein, 9 aa, Homo sapiens
ALFPLLPKV

SEQ ID NO: 3443 - protein, 10 aa, Homo sapiens
ALFTKVLENV

SEQ ID NO: 3444 - protein, 9 aa, Homo sapiens
ALHDQLFYL

SEQ ID NO: 3445 - protein, 9 aa, Homo sapiens
ALHSVEVEL

SEQ ID NO: 3446 - protein, 10 aa, Homo sapiens
ALIEGAGILL

SEQ ID NO: 3447 - protein, 10 aa, Homo sapiens
ALIEGVGILL

SEQ ID NO: 3448 - protein, 10 aa, Homo sapiens
ALIPIPLAVI

SEQ ID NO: 3449 - protein, 9 aa, Toxoplasma gondii
ALLALLIYA

SEQ ID NO: 3450 - protein, 9 aa, Homo sapiens
ALLDIIRSL

SEQ ID NO: 3451 - protein, 8 aa, Homo sapiens
ALLDKLYA

SEQ ID NO: 3452 - protein, 9 aa, Homo sapiens
ALLDKMVLL

SEQ ID NO: 3453 - protein, 10 aa, Homo sapiens
ALLDVTPKAV

SEQ ID NO: 3454 - protein, 9 aa, Homo sapiens
ALLDWVTSV

SEQ ID NO: 3455 - protein, 11 aa, Homo sapiens
ALLENMEGLFL

SEQ ID NO: 3456 - protein, 10 aa, Homo sapiens
ALLENPKMEL

SEQ ID NO: 3457 - protein, 9 aa, Homo sapiens
ALLEQVNAL

SEQ ID NO: 3458 - protein, 9 aa, Homo sapiens
ALLETVNRL

SEQ ID NO: 3459 - protein, 9 aa, Homo sapiens
ALLGGLVNV

SEQ ID NO: 3460 - protein, 10 aa, Homo sapiens
ALLKIEGVYA

SEQ ID NO: 3461 - protein, 9 aa, Homo sapiens
ALLNNVIEV

SEQ ID NO: 3462 - protein, 9 aa, Homo sapiens
ALLPDLPAL

SEQ ID NO: 3463 - protein, 9 aa, Homo sapiens
ALLPIFFGA

SEQ ID NO: 3464 - protein, 9 aa, Homo sapiens
ALLPSSPTL

SEQ ID NO: 3465 - protein, 9 aa, Homo sapiens
ALLPYFVYV

SEQ ID NO: 3466 - protein, 9 aa, Homo sapiens
ALLQSDVRL

SEQ ID NO: 3467 - protein, 9 aa, Homo sapiens
ALLSRLEQI

SEQ ID NO: 3468 - protein, 9 aa, Homo sapiens
ALLTVVSQV

SEQ ID NO: 3469 - protein, 9 aa, Homo sapiens
ALMADMVYV

SEQ ID NO: 3470 - protein, 9 aa, Homo sapiens
ALMPTLEAL

SEQ ID NO: 3471 - protein, 9 aa, Homo sapiens
ALNGHVEMV

SEQ ID NO: 3472 - protein, 9 aa, Homo sapiens
ALNSKILSV

SEQ ID NO: 3473 - protein, 9 aa, Homo sapiens
ALPDSMVSV

SEQ ID NO: 3474 - protein, 9 aa, Homo sapiens
ALPEIFTEL

SEQ ID NO: 3475 - protein, 9 aa, Homo sapiens
ALPPVLTTV

SEQ ID NO: 3476 - protein, 9 aa, Homo sapiens
ALPTLIPSV

SEQ ID NO: 3477 - protein, 9 aa, Homo sapiens
ALQSLLHLL

SEQ ID NO: 3478 - protein, 9 aa, Homo sapiens
ALSDLEITL

SEQ ID NO: 3479 - protein, 9 aa, Homo sapiens
ALSEQILMV

SEQ ID NO: 3480 - protein, 9 aa, Homo sapiens
ALSNLEVTL

SEQ ID NO: 3481 - protein, 9 aa, Homo sapiens
ALSPHNILL

SEQ ID NO: 3482 - protein, 9 aa, Homo sapiens
ALSQDIPEI

SEQ ID NO: 3483 - protein, 9 aa, Homo sapiens
ALSQINTKL

SEQ ID NO: 3484 - protein, 9 aa, Homo sapiens
ALSSVIKEL

SEQ ID NO: 3485 - protein, 9 aa, Homo sapiens
ALTELLAKI

SEQ ID NO: 3486 - protein, 9 aa, Homo sapiens
ALTEYTLYL

SEQ ID NO: 3487 - protein, 9 aa, Artificial Sequence
  unknown
ALTNAVAHV

SEQ ID NO: 3488 - protein, 9 aa, Homo sapiens
ALTPVVVTL

SEQ ID NO: 3489 - protein, 9 aa, Homo sapiens
ALTSVVVTL

SEQ ID NO: 3490 - protein, 9 aa, Homo sapiens
ALVDILSEV

SEQ ID NO: 3491 - protein, 9 aa, Homo sapiens
ALVDQLWKL

SEQ ID NO: 3492 - protein, 9 aa, Homo sapiens
ALVEKLESL

SEQ ID NO: 3493 - protein, 9 aa, Homo sapiens
ALVESLEYV

SEQ ID NO: 3494 - protein, 9 aa, Homo sapiens
ALVQDLAKA

SEQ ID NO: 3495 - protein, 9 aa, Homo sapiens
ALVVQVAEA

SEQ ID NO: 3496 - protein, 9 aa, Homo sapiens
ALWAGLLTL

SEQ ID NO: 3497 - protein, 8 aa, Homo sapiens
ALWDKLFN

SEQ ID NO: 3498 - protein, 9 aa, Homo sapiens
ALWDKLFNL

SEQ ID NO: 3499 - protein, 8 aa, Homo sapiens
ALWGFFPV

SEQ ID NO: 3500 - protein, 9 aa, Homo sapiens
ALWNEEALL

SEQ ID NO: 3501 - protein, 9 aa, Homo sapiens
ALYGQPLLL

SEQ ID NO: 3502 - protein, 9 aa, Homo sapiens
ALYPNVVQV

SEQ ID NO: 3503 - protein, 9 aa, Homo sapiens
ALYSKGILL

SEQ ID NO: 3504 - protein, 9 aa, Homo sapiens
AMAASPHAV

SEQ ID NO: 3505 - protein, 9 aa, Homo sapiens
AMAPGTVTV

SEQ ID NO: 3506 - protein, 9 aa, Homo sapiens
AMFDKKVQL

SEQ ID NO: 3507 - protein, 9 aa, Homo sapiens
AMLPSITNV

SEQ ID NO: 3508 - protein, 9 aa, Homo sapiens
AMNARPHKV

SEQ ID NO: 3509 - protein, 9 aa, Homo sapiens
AMNGHTAAV

SEQ ID NO: 3510 - protein, 10 aa, Homo sapiens
AMPALAPPEV

SEQ ID NO: 3511 - protein, 9 aa, Homo sapiens
AMPDSPAEV

SEQ ID NO: 3512 - protein, 10 aa, Homo sapiens
AMPPPPPQGV

SEQ ID NO: 3513 - protein, 11 aa, Homo sapiens
AMVPGHHIVSI

SEQ ID NO: 3514 - protein, 12 aa, Homo sapiens
AQGGVLPNIQAV

SEQ ID NO: 3515 - protein, 10 aa, Homo sapiens
AQYEHDLEVA

SEQ ID NO: 3516 - protein, 9 aa, Homo sapiens
ASVDKVLEL

SEQ ID NO: 3517 - protein, 9 aa, Homo sapiens
ATIGELAQV

SEQ ID NO: 3518 - protein, 9 aa, Homo sapiens
ATMPVVPSV

SEQ ID NO: 3519 - protein, 11 aa, Homo sapiens
AVAASKERSGV

SEQ ID NO: 3520 - protein, 9 aa, Homo sapiens
AVANIVNSV

SEQ ID NO: 3521 - protein, 8 aa, Homo sapiens
AVGPYIQV

SEQ ID NO: 3522 - protein, 11 aa, Homo sapiens
AVLGPLGLQEV

SEQ ID NO: 3523 - protein, 11 aa, Homo sapiens
AVLSKEYGFVL

SEQ ID NO: 3524 - protein, 9 aa, Homo sapiens
AVMEQIPEI

SEQ ID NO: 3525 - protein, 9 aa, Homo sapiens
AVTGILVQL

SEQ ID NO: 3526 - protein, 9 aa, Homo sapiens
DMYEQFQNI

SEQ ID NO: 3527 - protein, 11 aa, Homo sapiens
FAIDPHLLLSV

SEQ ID NO: 3528 - protein, 9 aa, Homo sapiens
FAIPMIHAV

SEQ ID NO: 3529 - protein, 9 aa, Homo sapiens
FAMPYFIQV

SEQ ID NO: 3530 - protein, 10 aa, Homo sapiens
FGSAFATPFL

SEQ ID NO: 3531 - protein, 10 aa, Homo sapiens
FIFPASNVYL

SEQ ID NO: 3532 - protein, 9 aa, Homo sapiens
FIIANIPLP

SEQ ID NO: 3533 - protein, 9 aa, Homo sapiens
FIISDFESV

SEQ ID NO: 3534 - protein, 9 aa, Homo sapiens
FILPFIIAA

SEQ ID NO: 3535 - protein, 8 aa, Homo sapiens
FILPFVSV

SEQ ID NO: 3536 - protein, 9 aa, Homo sapiens
FILPSSLYL

SEQ ID NO: 3537 - protein, 8 aa, Homo sapiens
FIPVALFV

SEQ ID NO: 3538 - protein, 11 aa, Homo sapiens
FIWKSGGDLTL

SEQ ID NO: 3539 - protein, 9 aa, Homo sapiens
FIWPMLIHI

SEQ ID NO: 3540 - protein, 11 aa, Homo sapiens
FIYPSNMQTML

SEQ ID NO: 3541 - protein, 9 aa, Homo sapiens
FIYTGTLNL

SEQ ID NO: 3542 - protein, 9 aa, Homo sapiens
FLADAKWIL

SEQ ID NO: 3543 - protein, 9 aa, Toxoplasma gondii
FLADLLHSV

SEQ ID NO: 3544 - protein, 10 aa, Homo sapiens
FLADPSAFVA

SEQ ID NO: 3545 - protein, 11 aa, Homo sapiens
FLAELPGSLSL

SEQ ID NO: 3546 - protein, 11 aa, Homo sapiens
FLAPARAILSL

SEQ ID NO: 3547 - protein, 8 aa, Homo sapiens
FLDGNELT

SEQ ID NO: 3548 - protein, 9 aa, Homo sapiens
FLDHVMYTI

SEQ ID NO: 3549 - protein, 9 aa, Homo sapiens
FLDLGPPGI

SEQ ID NO: 3550 - protein, 9 aa, Homo sapiens
FLDNLHINL

SEQ ID NO: 3551 - protein, 9 aa, Toxoplasma gondii
FLDRALLTL

SEQ ID NO: 3552 - protein, 9 aa, Homo sapiens
FLDSTSPLL

SEQ ID NO: 3553 - protein, 9 aa, Homo sapiens
FLDTLKVLV

SEQ ID NO: 3554 - protein, 8 aa, Homo sapiens
FLFDHLLT

SEQ ID NO: 3555 - protein, 9 aa, Homo sapiens
FLFDHLLTL

SEQ ID NO: 3556 - protein, 9 aa, Homo sapiens
FLFDKVVIV

SEQ ID NO: 3557 - protein, 10 aa, Homo sapiens
FLFDNDFPAL

SEQ ID NO: 3558 - protein, 9 aa, Homo sapiens
FLFDTQHFI

SEQ ID NO: 3559 - protein, 9 aa, Homo sapiens
FLFPVYPLI

SEQ ID NO: 3560 - protein, 11 aa, Homo sapiens
FLGASLKDEVL

SEQ ID NO: 3561 - protein, 10 aa, Homo sapiens
FLGENISNFL

SEQ ID NO: 3562 - protein, 10 aa, Homo sapiens
FLHDHVDLQV

SEQ ID NO: 3563 - protein, 9 aa, Homo sapiens
FLHEVLWEL

SEQ ID NO: 3564 - protein, 9 aa, Homo sapiens
FLIAQLPKL

SEQ ID NO: 3565 - protein, 10 aa, Homo sapiens
FLIETGPRGV

SEQ ID NO: 3566 - protein, 9 aa, Homo sapiens
FLIKVNTEN

SEQ ID NO: 3567 - protein, 9 aa, Homo sapiens
FLINFIHTL

SEQ ID NO: 3568 - protein, 9 aa, Homo sapiens
FLINTNSEL

SEQ ID NO: 3569 - protein, 9 aa, Homo sapiens
FLIPAVELI

SEQ ID NO: 3570 - protein, 9 aa, Homo sapiens
FLIPFVITV

SEQ ID NO: 3571 - protein, 10 aa, Homo sapiens
FLIQQKLVEA

SEQ ID NO: 3572 - protein, 9 aa, Homo sapiens
FLIRNIPVI

SEQ ID NO: 3573 - protein, 9 aa, Homo sapiens
FLITQLKML

SEQ ID NO: 3574 - protein, 9 aa, Homo sapiens
FLKEYLHFV

SEQ ID NO: 3575 - protein, 9 aa, Homo sapiens
FLKNELDNV

SEQ ID NO: 3576 - protein, 9 aa, Homo sapiens
FLLALEPEL

SEQ ID NO: 3577 - protein, 10 aa, Homo sapiens
FLLDGKVLSL

SEQ ID NO: 3578 - protein, 9 aa, Homo sapiens
FLLDKALLI

SEQ ID NO: 3579 - protein, 11 aa, Homo sapiens
FLLDPYKYMTL

SEQ ID NO: 3580 - protein, 10 aa, Homo sapiens
FLLDSAPLNV

SEQ ID NO: 3581 - protein, 10 aa, Homo sapiens
FLLEPGNLEV

SEQ ID NO: 3582 - protein, 10 aa, Homo sapiens
FLLGPRLVLA

SEQ ID NO: 3583 - protein, 9 aa, Homo sapiens
FLLPAGWIL

SEQ ID NO: 3584 - protein, 9 aa, Homo sapiens
FLLPDVIRI

SEQ ID NO: 3585 - protein, 10 aa, Homo sapiens
FLLPHPGLQV

SEQ ID NO: 3586 - protein, 11 aa, Homo sapiens
FLLPKVQSIQL

SEQ ID NO: 3587 - protein, 9 aa, Homo sapiens
FLLPLRIAL

SEQ ID NO: 3588 - protein, 9 aa, Homo sapiens
FLLPPVFNI

SEQ ID NO: 3589 - protein, 10 aa, Homo sapiens
FLLPSEVPAL

SEQ ID NO: 3590 - protein, 9 aa, Homo sapiens
FLLPTGVYL

SEQ ID NO: 3591 - protein, 9 aa, Homo sapiens
FLLPVAVKL

SEQ ID NO: 3592 - protein, 9 aa, Homo sapiens
FLLPVINEM

SEQ ID NO: 3593 - protein, 9 aa, Homo sapiens
FLMPATVFM

SEQ ID NO: 3594 - protein, 9 aa, Homo sapiens
FLMPGLAAL

SEQ ID NO: 3595 - protein, 10 aa, Homo sapiens
FLMQYPGRSL

SEQ ID NO: 3596 - protein, 9 aa, Homo sapiens
FLNDEVWNL

SEQ ID NO: 3597 - protein, 8 aa, Homo sapiens
FLNGLEIL

SEQ ID NO: 3598 - protein, 9 aa, Homo sapiens
FLNGLEILL

SEQ ID NO: 3599 - protein, 9 aa, Homo sapiens
FLNNQEYVL

SEQ ID NO: 3600 - protein, 9 aa, Homo sapiens
FLNQAQIEV

SEQ ID NO: 3601 - protein, 9 aa, Homo sapiens
FLNVTSVHL

SEQ ID NO: 3602 - protein, 9 aa, Homo sapiens
FLPESVAVV

SEQ ID NO: 3603 - protein, 9 aa, Homo sapiens
FLPLIVNTV

SEQ ID NO: 3604 - protein, 9 aa, Homo sapiens
FLPPLPTSV

SEQ ID NO: 3605 - protein, 9 aa, Homo sapiens
FLPPPFPPP

SEQ ID NO: 3606 - protein, 9 aa, Homo sapiens
FLPPSFPIV

SEQ ID NO: 3607 - protein, 9 aa, Homo sapiens
FLPPYTFQI

SEQ ID NO: 3608 - protein, 11 aa, Homo sapiens
FLQDIPDGLFL

SEQ ID NO: 3609 - protein, 10 aa, Homo sapiens
FLQEGDLISA

SEQ ID NO: 3610 - protein, 9 aa, Homo sapiens
FLQEYGLSV

SEQ ID NO: 3611 - protein, 10 aa, Homo sapiens
FLSDGTIISV

SEQ ID NO: 3612 - protein, 9 aa, Homo sapiens
FLSEKLERI

SEQ ID NO: 3613 - protein, 9 aa, Homo sapiens
FLSESVLAV

SEQ ID NO: 3614 - protein, 9 aa, Homo sapiens
FLSPFNMIL

SEQ ID NO: 3615 - protein, 9 aa, Homo sapiens
FLSSVIQNL

SEQ ID NO: 3616 - protein, 9 aa, Homo sapiens
FLSTINVGL

SEQ ID NO: 3617 - protein, 10 aa, Homo sapiens
FLSTLHEVYL

SEQ ID NO: 3618 - protein, 8 aa, Homo sapiens
FLTEIENL

SEQ ID NO: 3619 - protein, 9 aa, Homo sapiens
FLTHVNPRL

SEQ ID NO: 3620 - protein, 8 aa, Homo sapiens
FLVDSQFM

SEQ ID NO: 3621 - protein, 9 aa, Homo sapiens
FLVPVLEAL

SEQ ID NO: 3622 - protein, 10 aa, Homo sapiens
FLWDEGFHQL

SEQ ID NO: 3623 - protein, 11 aa, Homo sapiens
FLWDVPSNWTL

SEQ ID NO: 3624 - protein, 9 aa, Homo sapiens
FLWERPTLL

SEQ ID NO: 3625 - protein, 10 aa, Homo sapiens
FLWERPTLLV

SEQ ID NO: 3626 - protein, 10 aa, Homo sapiens
FLWPGLNVPL

SEQ ID NO: 3627 - protein, 11 aa, Homo sapiens
FLWQEGHSAFA

SEQ ID NO: 3628 - protein, 9 aa, Homo sapiens
FLYPFLHTV

SEQ ID NO: 3629 - protein, 8 aa, Homo sapiens
FLYPFPLA

SEQ ID NO: 3630 - protein, 9 aa, Homo sapiens
FLYQYSTRL

SEQ ID NO: 3631 - protein, 9 aa, Homo sapiens
FLYSDEVQI

SEQ ID NO: 3632 - protein, 10 aa, Homo sapiens
FLYSGEPTYL

SEQ ID NO: 3633 - protein, 9 aa, Homo sapiens
FMAPKAWTV

SEQ ID NO: 3634 - protein, 11 aa, Homo sapiens
FMAQALQEYNN

SEQ ID NO: 3635 - protein, 9 aa, Homo sapiens
FMLPDPQNI

SEQ ID NO: 3636 - protein, 11 aa, Homo sapiens
FMLPDPQNISL

SEQ ID NO: 3637 - protein, 9 aa, Homo sapiens
FMNPHLISV

SEQ ID NO: 3638 - protein, 10 aa, Homo sapiens
FMQDPMEIFV

SEQ ID NO: 3639 - protein, 9 aa, Homo sapiens
FMVDKAIYL

SEQ ID NO: 3640 - protein, 9 aa, Homo sapiens
FMYPVVLQV

SEQ ID NO: 3641 - protein, 9 aa, Homo sapiens
FQAEIAQLM

SEQ ID NO: 3642 - protein, 9 aa, Homo sapiens
FQDPVPLTV

SEQ ID NO: 3643 - protein, 9 aa, Homo sapiens
FQIGPVAGV

SEQ ID NO: 3644 - protein, 9 aa, Homo sapiens
FQTDLIYNL

SEQ ID NO: 3645 - protein, 9 aa, Homo sapiens
FQVPWLESV

SEQ ID NO: 3646 - protein, 9 aa, Homo sapiens
FVFPGELLL

SEQ ID NO: 3647 - protein, 9 aa, Toxoplasma gondii
FVGSYLVIV

SEQ ID NO: 3648 - protein, 9 aa, Homo sapiens
FVHDLVLYL

SEQ ID NO: 3649 - protein, 9 aa, Homo sapiens
FVLDKVPFL

SEQ ID NO: 3650 - protein, 9 aa, Homo sapiens
FVLPVATQI

SEQ ID NO: 3651 - protein, 11 aa, Homo sapiens
FVYDPLVDWTA

SEQ ID NO: 3652 - protein, 12 aa, Homo sapiens
FVYSQVVFSGKA

SEQ ID NO: 3653 - protein, 9 aa, Homo sapiens
GIAELVPGV

SEQ ID NO: 3654 - protein, 10 aa, Homo sapiens
GIHETTFNSI

SEQ ID NO: 3655 - protein, 11 aa, Homo sapiens
GILEGIGILAV

SEQ ID NO: 3656 - protein, 10 aa, Homo sapiens
GILGIQPPSV

SEQ ID NO: 3657 - protein, 9 aa, Homo sapiens
GILPMVPEV

SEQ ID NO: 3658 - protein, 9 aa, Homo sapiens
GIMKKAYEL

SEQ ID NO: 3659 - protein, 10 aa, Homo sapiens
GIYDGILHSI

SEQ ID NO: 3660 - protein, 10 aa, Homo sapiens
GLAAGGIVAV

SEQ ID NO: 3661 - protein, 8 aa, Homo sapiens
GLADKVYF

SEQ ID NO: 3662 - protein, 11 aa, Homo sapiens
GLAEQSVLAAL

SEQ ID NO: 3663 - protein, 9 aa, Homo sapiens
GLAESVSTL

SEQ ID NO: 3664 - protein, 10 aa, Homo sapiens
GLAPFLLNAV

SEQ ID NO: 3665 - protein, 9 aa, Homo sapiens
GLAPKPVQV

SEQ ID NO: 3666 - protein, 9 aa, Homo sapiens
GLAQVITAV

SEQ ID NO: 3667 - protein, 9 aa, Homo sapiens
GLDNINVFL

SEQ ID NO: 3668 - protein, 10 aa, Homo sapiens
GLDPGKQYHV

SEQ ID NO: 3669 - protein, 11 aa, Homo sapiens
GLDPLGYEIQL

SEQ ID NO: 3670 - protein, 12 aa, Homo sapiens
GLESEELEPEEL

SEQ ID NO: 3671 - protein, 9 aa, Homo sapiens
GLFDTAISL

SEQ ID NO: 3672 - protein, 9 aa, Homo sapiens
GLFSAKLFL

SEQ ID NO: 3673 - protein, 9 aa, Homo sapiens
GLHGWAFTL

SEQ ID NO: 3674 - protein, 9 aa, Homo sapiens
GLHNVVYGI

SEQ ID NO: 3675 - protein, 9 aa, Homo sapiens
GLIDEIYGI

SEQ ID NO: 3676 - protein, 9 aa, Homo sapiens
GLIDENPGL

SEQ ID NO: 3677 - protein, 8 aa, Homo sapiens
GLIDFAIQ

SEQ ID NO: 3678 - protein, 9 aa, Homo sapiens
GLIDGVVEA

SEQ ID NO: 3679 - protein, 9 aa, Homo sapiens
GLIDVHVHL

SEQ ID NO: 3680 - protein, 9 aa, Homo sapiens
GLIGQLDEV

SEQ ID NO: 3681 - protein, 10 aa, Homo sapiens
GLINTGVLSV

SEQ ID NO: 3682 - protein, 10 aa, Homo sapiens
GLIRFPLMTI

SEQ ID NO: 3683 - protein, 9 aa, Homo sapiens
GLKELSEYV

SEQ ID NO: 3684 - protein, 9 aa, Homo sapiens
GLLDAVTYL

SEQ ID NO: 3685 - protein, 9 aa, Homo sapiens
GLLDLPFRV

SEQ ID NO: 3686 - protein, 10 aa, Homo sapiens
GLLDNPELRV

SEQ ID NO: 3687 - protein, 11 aa, Homo sapiens
GLLDPGMLVNI

SEQ ID NO: 3688 - protein, 9 aa, Homo sapiens
GLLEGVRGV

SEQ ID NO: 3689 - protein, 9 aa, Homo sapiens
GLLGNVAEV

SEQ ID NO: 3690 - protein, 9 aa, Homo sapiens
GLLGNVVNI

SEQ ID NO: 3691 - protein, 9 aa, Homo sapiens
GLLKVVPQA

SEQ ID NO: 3692 - protein, 9 aa, Homo sapiens
GLLNNIAEV

SEQ ID NO: 3693 - protein, 10 aa, Homo sapiens
GLLNRPNPLL

SEQ ID NO: 3694 - protein, 9 aa, Homo sapiens
GLLPDVPSL

SEQ ID NO: 3695 - protein, 11 aa, Homo sapiens
GLLPEPNILQL

SEQ ID NO: 3696 - protein, 9 aa, Homo sapiens
GLLRIIPYL

SEQ ID NO: 3697 - protein, 10 aa, Homo sapiens
GLMDDVDFKA

SEQ ID NO: 3698 - protein, 9 aa, Homo sapiens
GLMEDLLKL

SEQ ID NO: 3699 - protein, 9 aa, Homo sapiens
GLQQELAAL

SEQ ID NO: 3700 - protein, 9 aa, Homo sapiens
GLSDLRLEL

SEQ ID NO: 3701 - protein, 9 aa, Homo sapiens
GLSETILAV

SEQ ID NO: 3702 - protein, 9 aa, Homo sapiens
GLSQVAVTV

SEQ ID NO: 3703 - protein, 9 aa, Homo sapiens
GLSVIIPHV

SEQ ID NO: 3704 - protein, 9 aa, Homo sapiens
GLTPFVFRL

SEQ ID NO: 3705 - protein, 9 aa, Homo sapiens
GLTSAIQAV

SEQ ID NO: 3706 - protein, 10 aa, Homo sapiens
GLVAGGIIGA

SEQ ID NO: 3707 - protein, 9 aa, Homo sapiens
GLVASLISV

SEQ ID NO: 3708 - protein, 9 aa, Homo sapiens
GLVATLQSL

SEQ ID NO: 3709 - protein, 9 aa, Homo sapiens
GLVDQLVKA

SEQ ID NO: 3710 - protein, 8 aa, Homo sapiens
GLVPFLVS

SEQ ID NO: 3711 - protein, 9 aa, Homo sapiens
GLWEQENHL

SEQ ID NO: 3712 - protein, 10 aa, Homo sapiens
GLWGQSVPTA

SEQ ID NO: 3713 - protein, 9 aa, Homo sapiens
GLWGTVVNI

SEQ ID NO: 3714 - protein, 10 aa, Homo sapiens
GLYDGMEHLI

SEQ ID NO: 3715 - protein, 9 aa, Homo sapiens
GLYEGLDWL

SEQ ID NO: 3716 - protein, 10 aa, Homo sapiens
GLYEGLDWLA

SEQ ID NO: 3717 - protein, 9 aa, Homo sapiens
GLYEGLTWL

SEQ ID NO: 3718 - protein, 9 aa, Homo sapiens
GLYELVWRV

SEQ ID NO: 3719 - protein, 9 aa, Homo sapiens
GLYGAIFRL

SEQ ID NO: 3720 - protein, 9 aa, Homo sapiens
GLYPNLIQV

SEQ ID NO: 3721 - protein, 10 aa, Homo sapiens
GMASLNLPAV

SEQ ID NO: 3722 - protein, 9 aa, Homo sapiens
GMDRYLIYV

SEQ ID NO: 3723 - protein, 9 aa, Homo sapiens
GMLDGLVNV

SEQ ID NO: 3724 - protein, 9 aa, Homo sapiens
GMLEKIDMI

SEQ ID NO: 3725 - protein, 9 aa, Homo sapiens
GMVETRVFL

SEQ ID NO: 3726 - protein, 9 aa, Homo sapiens
GMYPNLVHV

SEQ ID NO: 3727 - protein, 9 aa, Homo sapiens
GMYVFLHAV

SEQ ID NO: 3728 - protein, 10 aa, Homo sapiens
GQFPSYLETV

SEQ ID NO: 3729 - protein, 9 aa, Homo sapiens
GQIEVVPEV

SEQ ID NO: 3730 - protein, 9 aa, Homo sapiens
GQWKKGFVL

SEQ ID NO: 3731 - protein, 11 aa, Homo sapiens
GVYKKLTGKDV

SEQ ID NO: 3732 - protein, 9 aa, Homo sapiens
HIIENIVAV

SEQ ID NO: 3733 - protein, 9 aa, Homo sapiens
HLADFTPRL

SEQ ID NO: 3734 - protein, 9 aa, Homo sapiens
HLAELIAEL

SEQ ID NO: 3735 - protein, 9 aa, Homo sapiens
HLGDFLVFL

SEQ ID NO: 3736 - protein, 9 aa, Homo sapiens
HLIEPLANA

SEQ ID NO: 3737 - protein, 9 aa, Homo sapiens
HLINYIIFL

SEQ ID NO: 3738 - protein, 9 aa, Homo sapiens
HLLEEPIYL

SEQ ID NO: 3739 - protein, 9 aa, Homo sapiens
HLLNESPML

SEQ ID NO: 3740 - protein, 10 aa, Homo sapiens
HLLPTAPTTV

SEQ ID NO: 3741 - protein, 9 aa, Homo sapiens
HLLSDELLL

SEQ ID NO: 3742 - protein, 12 aa, Artificial Sequence
  unknown
HLPAEFTPAVHA

SEQ ID NO: 3743 - protein, 9 aa, Homo sapiens
HLSIINEYL

SEQ ID NO: 3744 - protein, 9 aa, Homo sapiens
HLSNMEVQV

SEQ ID NO: 3745 - protein, 9 aa, Homo sapiens
HLSVVSVTV

SEQ ID NO: 3746 - protein, 10 aa, Homo sapiens
HLTPEEKSAV

SEQ ID NO: 3747 - protein, 9 aa, Homo sapiens
HLWNSIHGL

SEQ ID NO: 3748 - protein, 11 aa, Homo sapiens
HLYSSIEHLTT

SEQ ID NO: 3749 - protein, 9 aa, Homo sapiens
HQILTPFLL

SEQ ID NO: 3750 - protein, 8 aa, Homo sapiens
HVFKVFVA

SEQ ID NO: 3751 - protein, 9 aa, Homo sapiens
IAFPTSISV

SEQ ID NO: 3752 - protein, 12 aa, Homo sapiens
IALNEDLRSWTA

SEQ ID NO: 3753 - protein, 11 aa, Homo sapiens
ICLGHQLLALA

SEQ ID NO: 3754 - protein, 11 aa, Homo sapiens
IIAPPERKYSV

SEQ ID NO: 3755 - protein, 9 aa, Homo sapiens
IIFVPVPQL

SEQ ID NO: 3756 - protein, 9 aa, Homo sapiens
IIIDSVPEV

SEQ ID NO: 3757 - protein, 9 aa, Homo sapiens
IIINHVISV

SEQ ID NO: 3758 - protein, 9 aa, Homo sapiens
IIMETVPQL

SEQ ID NO: 3759 - protein, 9 aa, Homo sapiens
IIMPHNIYL

SEQ ID NO: 3760 - protein, 9 aa, Homo sapiens
IINTHTLLL

SEQ ID NO: 3761 - protein, 8 aa, Homo sapiens
IIPEGTWI

SEQ ID NO: 3762 - protein, 9 aa, Homo sapiens
ILADATEQV

SEQ ID NO: 3763 - protein, 9 aa, Homo sapiens
ILADLLPSL

SEQ ID NO: 3764 - protein, 9 aa, Homo sapiens
ILAPLAWDL

SEQ ID NO: 3765 - protein, 9 aa, Homo sapiens
ILAQIMPFL

SEQ ID NO: 3766 - protein, 9 aa, Homo sapiens
ILAQQPLSV

SEQ ID NO: 3767 - protein, 9 aa, Homo sapiens
ILDDSHLLV

SEQ ID NO: 3768 - protein, 9 aa, Homo sapiens
ILDFQPPEL

SEQ ID NO: 3769 - protein, 9 aa, Homo sapiens
ILEPFLPAV

SEQ ID NO: 3770 - protein, 9 aa, Homo sapiens
ILEPSLYTV

SEQ ID NO: 3771 - protein, 10 aa, Homo sapiens
ILFANPNIFV

SEQ ID NO: 3772 - protein, 9 aa, Homo sapiens
ILGIQPPSV

SEQ ID NO: 3773 - protein, 9 aa, Homo sapiens
ILIGYLEYV

SEQ ID NO: 3774 - protein, 9 aa, Homo sapiens
ILIHDVPLL

SEQ ID NO: 3775 - protein, 9 aa, Homo sapiens
ILISTLPSV

SEQ ID NO: 3776 - protein, 9 aa, Homo sapiens
ILLDNEFHV

SEQ ID NO: 3777 - protein, 9 aa, Homo sapiens
ILLDRLLYL

SEQ ID NO: 3778 - protein, 8 aa, Homo sapiens
ILLEHIIM

SEQ ID NO: 3779 - protein, 9 aa, Homo sapiens
ILLEKILSL

SEQ ID NO: 3780 - protein, 9 aa, Homo sapiens
ILLKDILSV

SEQ ID NO: 3781 - protein, 11 aa, Homo sapiens
ILLNPAYDVYL

SEQ ID NO: 3782 - protein, 9 aa, Homo sapiens
ILLPSVFGV

SEQ ID NO: 3783 - protein, 9 aa, Homo sapiens
ILLPYLQTL

SEQ ID NO: 3784 - protein, 9 aa, Homo sapiens
ILLSGIYNV

SEQ ID NO: 3785 - protein, 9 aa, Homo sapiens
ILLSVPLLV

SEQ ID NO: 3786 - protein, 10 aa, Homo sapiens
ILLSVPLLVV

SEQ ID NO: 3787 - protein, 10 aa, Homo sapiens
ILMDPSPEYA

SEQ ID NO: 3788 - protein, 10 aa, Homo sapiens
ILMSYDHVEL

SEQ ID NO: 3789 - protein, 11 aa, Homo sapiens
ILNPDNSFEIL

SEQ ID NO: 3790 - protein, 9 aa, Homo sapiens
ILNPEVVTV

SEQ ID NO: 3791 - protein, 9 aa, Homo sapiens
ILNPLLTLL

SEQ ID NO: 3792 - protein, 9 aa, Homo sapiens
ILPVPAFNV

SEQ ID NO: 3793 - protein, 10 aa, Homo sapiens
ILQDLQPFLV

SEQ ID NO: 3794 - protein, 9 aa, Homo sapiens
ILQNGLETL

SEQ ID NO: 3795 - protein, 9 aa, Homo sapiens
ILSETELHV

SEQ ID NO: 3796 - protein, 10 aa, Homo sapiens
ILSGIGVSQV

SEQ ID NO: 3797 - protein, 10 aa, Homo sapiens
ILSKDGVLYV

SEQ ID NO: 3798 - protein, 9 aa, Homo sapiens
ILSMQIPFV

SEQ ID NO: 3799 - protein, 9 aa, Homo sapiens
ILSPLNVFV

SEQ ID NO: 3800 - protein, 9 aa, Homo sapiens
ILSQYITFV

SEQ ID NO: 3801 - protein, 9 aa, Homo sapiens
ILTETINTV

SEQ ID NO: 3802 - protein, 8 aa, Homo sapiens
ILTLKYPI

SEQ ID NO: 3803 - protein, 9 aa, Homo sapiens
ILVDTVWAL

SEQ ID NO: 3804 - protein, 9 aa, Homo sapiens
ILVGLLHMV

SEQ ID NO: 3805 - protein, 9 aa, Homo sapiens
ILVQVIPVV

SEQ ID NO: 3806 - protein, 9 aa, Homo sapiens
ILWEHLEIL

SEQ ID NO: 3807 - protein, 9 aa, Homo sapiens
ILWETVPSM

SEQ ID NO: 3808 - protein, 9 aa, Homo sapiens
ILWKDVTEA

SEQ ID NO: 3809 - protein, 10 aa, Homo sapiens
ILYDIPDIRL

SEQ ID NO: 3810 - protein, 9 aa, Homo sapiens
ILYPKTLFL

SEQ ID NO: 3811 - protein, 9 aa, Homo sapiens
ILYPSTLFL

SEQ ID NO: 3812 - protein, 9 aa, Homo sapiens
ILYSKTEHL

SEQ ID NO: 3813 - protein, 9 aa, Homo sapiens
IQHDLIFSL

SEQ ID NO: 3814 - protein, 9 aa, Toxoplasma gondii  ME49
IQTAVRLLL

SEQ ID NO: 3815 - protein, 9 aa, Homo sapiens
ITTDVLYTI

SEQ ID NO: 3816 - protein, 9 aa, Homo sapiens
KAFTYTVAA

SEQ ID NO: 3817 - protein, 9 aa, Homo sapiens
KAMEKLESV

SEQ ID NO: 3818 - protein, 9 aa, Homo sapiens
KIAQFLESV

SEQ ID NO: 3819 - protein, 9 aa, Homo sapiens
KIDDTIRYL

SEQ ID NO: 3820 - protein, 11 aa, Homo sapiens
KIFEMGPVFTL

SEQ ID NO: 3821 - protein, 9 aa, Homo sapiens
KIGSIIFQV

SEQ ID NO: 3822 - protein, 12 aa, Homo sapiens
KIIAPPERKYSV

SEQ ID NO: 3823 - protein, 9 aa, Homo sapiens
KIIEYSVYL

SEQ ID NO: 3824 - protein, 9 aa, Homo sapiens
KILDELEKV

SEQ ID NO: 3825 - protein, 9 aa, Homo sapiens
KILDVLEEI

SEQ ID NO: 3826 - protein, 9 aa, Homo sapiens
KILPDLNTV

SEQ ID NO: 3827 - protein, 9 aa, Homo sapiens
KIMDYSLLL

SEQ ID NO: 3828 - protein, 9 aa, Homo sapiens
KISEVVELL

SEQ ID NO: 3829 - protein, 9 aa, Homo sapiens
KITTVIQHV

SEQ ID NO: 3830 - protein, 9 aa, Homo sapiens
KIVDFSYSV

SEQ ID NO: 3831 - protein, 9 aa, Homo sapiens
KIWDPVHRV

SEQ ID NO: 3832 - protein, 11 aa, Homo sapiens
KIWDVSVNSVV

SEQ ID NO: 3833 - protein, 9 aa, Homo sapiens
KLAEALPSL

SEQ ID NO: 3834 - protein, 10 aa, Homo sapiens
KLAEGAGIQL

SEQ ID NO: 3835 - protein, 10 aa, Homo sapiens
KLAELKQECL

SEQ ID NO: 3836 - protein, 10 aa, Homo sapiens
KLAEVGRVYL

SEQ ID NO: 3837 - protein, 9 aa, Homo sapiens
KLDPTKTTL

SEQ ID NO: 3838 - protein, 9 aa, Homo sapiens
KLDVGNAEV

SEQ ID NO: 3839 - protein, 9 aa, Homo sapiens
KLEDGPKFL

SEQ ID NO: 3840 - protein, 9 aa, Homo sapiens
KLFAGLVHV

SEQ ID NO: 3841 - protein, 9 aa, Homo sapiens
KLFAIPILL

SEQ ID NO: 3842 - protein, 9 aa, Homo sapiens
KLFDAPLSI

SEQ ID NO: 3843 - protein, 12 aa, Homo sapiens
KLFDDDDSGKIS

SEQ ID NO: 3844 - protein, 10 aa, Homo sapiens
KLFDDKLQNC

SEQ ID NO: 3845 - protein, 9 aa, Homo sapiens
KLFDTQQFL

SEQ ID NO: 3846 - protein, 8 aa, Homo sapiens
KLFGMIIT

SEQ ID NO: 3847 - protein, 9 aa, Homo sapiens
KLFGMIITI

SEQ ID NO: 3848 - protein, 11 aa, Homo sapiens
KLFNESHGIFL

SEQ ID NO: 3849 - protein, 9 aa, Homo sapiens
KLFNKFIGK

SEQ ID NO: 3850 - protein, 10 aa, Homo sapiens
KLFPDTPLAL

SEQ ID NO: 3851 - protein, 9 aa, Homo sapiens
KLFQGQLVL

SEQ ID NO: 3852 - protein, 9 aa, Homo sapiens
KLFTQIFGV

SEQ ID NO: 3853 - protein, 8 aa, Homo sapiens
KLGDFGLL

SEQ ID NO: 3854 - protein, 11 aa, Homo sapiens
KLGEFAKVLEL

SEQ ID NO: 3855 - protein, 9 aa, Homo sapiens
KLGEIVTTI

SEQ ID NO: 3856 - protein, 8 aa, Homo sapiens
KLGIAPQI

SEQ ID NO: 3857 - protein, 9 aa, Homo sapiens
KLHEAVRAV

SEQ ID NO: 3858 - protein, 9 aa, Homo sapiens
KLIANNTTV

SEQ ID NO: 3859 - protein, 9 aa, Homo sapiens
KLIAQNLEL

SEQ ID NO: 3860 - protein, 10 aa, Homo sapiens
KLIDETQDML

SEQ ID NO: 3861 - protein, 11 aa, Homo sapiens
KLIDFGSGALL

SEQ ID NO: 3862 - protein, 9 aa, Homo sapiens
KLIDKLDSL

SEQ ID NO: 3863 - protein, 9 aa, Homo sapiens
KLIDLEHLL

SEQ ID NO: 3864 - protein, 11 aa, Homo sapiens
KLIDLSQVMYL

SEQ ID NO: 3865 - protein, 10 aa, Homo sapiens
KLIGDTPIDT

SEQ ID NO: 3866 - protein, 9 aa, Homo sapiens
KLIGEVFNI

SEQ ID NO: 3867 - protein, 9 aa, Homo sapiens
KLIGQVHEV

SEQ ID NO: 3868 - protein, 10 aa, Homo sapiens
KLINDSVFFL

SEQ ID NO: 3869 - protein, 9 aa, Homo sapiens
KLIPLLLQL

SEQ ID NO: 3870 - protein, 10 aa, Homo sapiens
KLIQLPVVYV

SEQ ID NO: 3871 - protein, 9 aa, Homo sapiens
KLISELQKL

SEQ ID NO: 3872 - protein, 10 aa, Homo sapiens
KLKPGDLVGV

SEQ ID NO: 3873 - protein, 11 aa, Homo sapiens
KLLDDEQPLRL

SEQ ID NO: 3874 - protein, 10 aa, Homo sapiens
KLLDIPGLEV

SEQ ID NO: 3875 - protein, 9 aa, Homo sapiens
KLLDKISEL

SEQ ID NO: 3876 - protein, 11 aa, Homo sapiens
KLLDPEDVAVQ

SEQ ID NO: 3877 - protein, 9 aa, Homo sapiens
KLLDRETIS

SEQ ID NO: 3878 - protein, 8 aa, Homo sapiens
KLLEPVLL

SEQ ID NO: 3879 - protein, 10 aa, Homo sapiens
KLLEVNGVAL

SEQ ID NO: 3880 - protein, 9 aa, Homo sapiens
KLLFWVTEV

SEQ ID NO: 3881 - protein, 9 aa, Homo sapiens
KLLGSMEQV

SEQ ID NO: 3882 - protein, 9 aa, Homo sapiens
KLLNKIYEA

SEQ ID NO: 3883 - protein, 11 aa, Homo sapiens
KLLPADALVNC

SEQ ID NO: 3884 - protein, 9 aa, Homo sapiens
KLLPQLTYL

SEQ ID NO: 3885 - protein, 9 aa, Homo sapiens
KLLPSVTEL

SEQ ID NO: 3886 - protein, 10 aa, Homo sapiens
KLLSDPNYGV

SEQ ID NO: 3887 - protein, 9 aa, Homo sapiens
KLLSENTNL

SEQ ID NO: 3888 - protein, 9 aa, Homo sapiens
KLLSKFYEL

SEQ ID NO: 3889 - protein, 11 aa, Homo sapiens
KLMDEVAGIVA

SEQ ID NO: 3890 - protein, 10 aa, Homo sapiens
KLMDVGLIAI

SEQ ID NO: 3891 - protein, 9 aa, Homo sapiens
KLMELLEEI

SEQ ID NO: 3892 - protein, 9 aa, Homo sapiens
KLMQQQQEV

SEQ ID NO: 3893 - protein, 9 aa, Homo sapiens
KLMTALVNV

SEQ ID NO: 3894 - protein, 9 aa, Homo sapiens
KLNATNIEL

SEQ ID NO: 3895 - protein, 9 aa, Homo sapiens
KLNEMSYEL

SEQ ID NO: 3896 - protein, 9 aa, Homo sapiens
KLNVAPLAV

SEQ ID NO: 3897 - protein, 9 aa, Homo sapiens
KLPVPLESV

SEQ ID NO: 3898 - protein, 9 aa, Homo sapiens
KLQDGVHII

SEQ ID NO: 3899 - protein, 9 aa, Homo sapiens
KLQEEIPVL

SEQ ID NO: 3900 - protein, 9 aa, Homo sapiens
KLQEELNKV

SEQ ID NO: 3901 - protein, 9 aa, Homo sapiens
KLQEKIQEL

SEQ ID NO: 3902 - protein, 9 aa, Homo sapiens
KLQENLQQL

SEQ ID NO: 3903 - protein, 9 aa, Homo sapiens
KLQEQIHRV

SEQ ID NO: 3904 - protein, 8 aa, Homo sapiens
KLQNIMML

SEQ ID NO: 3905 - protein, 9 aa, Homo sapiens
KLQNIMMLL

SEQ ID NO: 3906 - protein, 9 aa, Homo sapiens
KLQNLNIFL

SEQ ID NO: 3907 - protein, 9 aa, Homo sapiens
KLQQHIFAV

SEQ ID NO: 3908 - protein, 9 aa, Homo sapiens
KLRHIVDEV

SEQ ID NO: 3909 - protein, 9 aa, Homo sapiens
KLSEIDVAL

SEQ ID NO: 3910 - protein, 9 aa, Homo sapiens
KLSELEAAL

SEQ ID NO: 3911 - protein, 9 aa, Homo sapiens
KLSLVAAML

SEQ ID NO: 3912 - protein, 9 aa, Homo sapiens
KLTEENTTL

SEQ ID NO: 3913 - protein, 9 aa, Homo sapiens
KLTEIRHEV

SEQ ID NO: 3914 - protein, 9 aa, Homo sapiens
KLTSVLEAV

SEQ ID NO: 3915 - protein, 9 aa, Homo sapiens
KLVDEEPQL

SEQ ID NO: 3916 - protein, 10 aa, Homo sapiens
KLVEFDFLGA

SEQ ID NO: 3917 - protein, 9 aa, Homo sapiens
KLVERLHMV

SEQ ID NO: 3918 - protein, 9 aa, Homo sapiens
KLVTTVTEI

SEQ ID NO: 3919 - protein, 9 aa, Homo sapiens
KLWDIINVN

SEQ ID NO: 3920 - protein, 10 aa, Homo sapiens
KLWDIINVNI

SEQ ID NO: 3921 - protein, 10 aa, Homo sapiens
KLWDISEVMV

SEQ ID NO: 3922 - protein, 9 aa, Homo sapiens
KLWDLEQQV

SEQ ID NO: 3923 - protein, 9 aa, Homo sapiens
KLWDLLYKL

SEQ ID NO: 3924 - protein, 10 aa, Homo sapiens
KLWDNELQYV

SEQ ID NO: 3925 - protein, 9 aa, Homo sapiens
KLWEGLTEL

SEQ ID NO: 3926 - protein, 9 aa, Homo sapiens
KLWEMDNML

SEQ ID NO: 3927 - protein, 10 aa, Homo sapiens
KLWEMDNMLI

SEQ ID NO: 3928 - protein, 11 aa, Homo sapiens
KLWEMDNMLIQ

SEQ ID NO: 3929 - protein, 9 aa, Homo sapiens
KLWKENPGL

SEQ ID NO: 3930 - protein, 9 aa, Homo sapiens
KLWNGLVKV

SEQ ID NO: 3931 - protein, 9 aa, Homo sapiens
KLWQTPLHV

SEQ ID NO: 3932 - protein, 9 aa, Homo sapiens
KLWSETFDV

SEQ ID NO: 3933 - protein, 10 aa, Homo sapiens
KLYAGAILEV

SEQ ID NO: 3934 - protein, 9 aa, Homo sapiens
KLYEAVPQL

SEQ ID NO: 3935 - protein, 10 aa, Homo sapiens
KLYESLLPFA

SEQ ID NO: 3936 - protein, 9 aa, Homo sapiens
KLYGKPIRV

SEQ ID NO: 3937 - protein, 9 aa, Homo sapiens
KLYKNLLYL

SEQ ID NO: 3938 - protein, 10 aa, Homo sapiens
KLYNPENIYL

SEQ ID NO: 3939 - protein, 11 aa, Homo sapiens
KMADEDALRKI

SEQ ID NO: 3940 - protein, 9 aa, Homo sapiens
KMAELVHFL

SEQ ID NO: 3941 - protein, 11 aa, Homo sapiens
KMDDPDYWRTV

SEQ ID NO: 3942 - protein, 9 aa, Homo sapiens
KMDESKHEI

SEQ ID NO: 3943 - protein, 9 aa, Homo sapiens
KMFSDEILL

SEQ ID NO: 3944 - protein, 9 aa, Homo sapiens
KMHARDFTV

SEQ ID NO: 3945 - protein, 10 aa, Homo sapiens
KMIEDLQNEL

SEQ ID NO: 3946 - protein, 9 aa, Homo sapiens
KMSELRVTL

SEQ ID NO: 3947 - protein, 9 aa, Homo sapiens
KMVEDLISV

SEQ ID NO: 3948 - protein, 10 aa, Homo sapiens
KMWEELPEVV

SEQ ID NO: 3949 - protein, 8 aa, Homo sapiens
KQFTTVVA

SEQ ID NO: 3950 - protein, 10 aa, Homo sapiens
KQVDFLNWEV

SEQ ID NO: 3951 - protein, 9 aa, Homo sapiens
KRGDVIYIL

SEQ ID NO: 3952 - protein, 12 aa, Homo sapiens
KTDPSILGGMIV

SEQ ID NO: 3953 - protein, 10 aa, Homo sapiens
KTFPGFFSPM

SEQ ID NO: 3954 - protein, 10 aa, Homo sapiens
KTIEDTLMTV

SEQ ID NO: 3955 - protein, 9 aa, Homo sapiens
KTIQQLETV

SEQ ID NO: 3956 - protein, 9 aa, Homo sapiens
KTKEGVLYV

SEQ ID NO: 3957 - protein, 9 aa, Homo sapiens
KTLEGEFSV

SEQ ID NO: 3958 - protein, 9 aa, Homo sapiens
KTYDKTVAL

SEQ ID NO: 3959 - protein, 9 aa, Homo sapiens
KVIDYVPGI

SEQ ID NO: 3960 - protein, 9 aa, Homo sapiens
KVLDLKINL

SEQ ID NO: 3961 - protein, 9 aa, Homo sapiens
KVLDLRINL

SEQ ID NO: 3962 - protein, 9 aa, Homo sapiens
KVVGKDYLL

SEQ ID NO: 3963 - protein, 9 aa, Homo sapiens
KVWGNVVTV

SEQ ID NO: 3964 - protein, 9 aa, Homo sapiens
LAAEFLKQV

SEQ ID NO: 3965 - protein, 8 aa, Homo sapiens
LADLVHHV

SEQ ID NO: 3966 - protein, 12 aa, Homo sapiens
LALNEDLRSWTA

SEQ ID NO: 3967 - protein, 9 aa, Homo sapiens
LIDPNTLQV

SEQ ID NO: 3968 - protein, 9 aa, Homo sapiens
LILESIPVV

SEQ ID NO: 3969 - protein, 9 aa, Homo sapiens
LIMDMIPAI

SEQ ID NO: 3970 - protein, 9 aa, Homo sapiens
LIWPLLSTV

SEQ ID NO: 3971 - protein, 9 aa, Homo sapiens
LLAEALNQV

SEQ ID NO: 3972 - protein, 9 aa, Homo sapiens
LLAEPVPGI

SEQ ID NO: 3973 - protein, 9 aa, Homo sapiens
LLAEQGYEV

SEQ ID NO: 3974 - protein, 9 aa, Homo sapiens
LLAPIRVLL

SEQ ID NO: 3975 - protein, 9 aa, Homo sapiens
LLARPSLLL

SEQ ID NO: 3976 - protein, 9 aa, Homo sapiens
LLASEVPQL

SEQ ID NO: 3977 - protein, 9 aa, Homo sapiens
LLATVLQAV

SEQ ID NO: 3978 - protein, 9 aa, Homo sapiens
LLDHAPPEI

SEQ ID NO: 3979 - protein, 9 aa, Homo sapiens
LLDHVLLTL

SEQ ID NO: 3980 - protein, 8 aa, Homo sapiens
LLDKLYAL

SEQ ID NO: 3981 - protein, 8 aa, Homo sapiens
LLDRFLAT

SEQ ID NO: 3982 - protein, 9 aa, Homo sapiens
LLDSAPLNV

SEQ ID NO: 3983 - protein, 9 aa, Homo sapiens
LLDVQPHTV

SEQ ID NO: 3984 - protein, 9 aa, Homo sapiens
LLFDSVIHL

SEQ ID NO: 3985 - protein, 9 aa, Homo sapiens
LLFERATFL

SEQ ID NO: 3986 - protein, 10 aa, Homo sapiens
LLFPFYIPSA

SEQ ID NO: 3987 - protein, 9 aa, Homo sapiens
LLHEENFSV

SEQ ID NO: 3988 - protein, 9 aa, Homo sapiens
LLHELLTHV

SEQ ID NO: 3989 - protein, 8 aa, Homo sapiens
LLIENVAS

SEQ ID NO: 3990 - protein, 9 aa, Homo sapiens
LLIPGLATA

SEQ ID NO: 3991 - protein, 9 aa, Homo sapiens
LLIPVVPGV

SEQ ID NO: 3992 - protein, 9 aa, Homo sapiens
LLLEILHEI

SEQ ID NO: 3993 - protein, 9 aa, Homo sapiens
LLLETLPEL

SEQ ID NO: 3994 - protein, 9 aa, Homo sapiens
LLLKGVEAV

SEQ ID NO: 3995 - protein, 9 aa, Homo sapiens
LLLNSTQSV

SEQ ID NO: 3996 - protein, 8 aa, Homo sapiens
LLLPDYYL

SEQ ID NO: 3997 - protein, 9 aa, Homo sapiens
LLLPDYYLV

SEQ ID NO: 3998 - protein, 10 aa, Homo sapiens
LLLPDYYLVT

SEQ ID NO: 3999 - protein, 11 aa, Homo sapiens
LLLPDYYLVTV

SEQ ID NO: 4000 - protein, 9 aa, Homo sapiens
LLLPFLPQV

SEQ ID NO: 4001 - protein, 9 aa, Homo sapiens
LLLPISPFM

SEQ ID NO: 4002 - protein, 10 aa, Homo sapiens
LLLPTGVFQV

SEQ ID NO: 4003 - protein, 9 aa, Homo sapiens
LLLSVLPQL

SEQ ID NO: 4004 - protein, 9 aa, Homo sapiens
LLMATILHL

SEQ ID NO: 4005 - protein, 9 aa, Homo sapiens
LLMIFSHQL

SEQ ID NO: 4006 - protein, 9 aa, Homo sapiens
LLMVLSPRL

SEQ ID NO: 4007 - protein, 9 aa, Homo sapiens
LLNEILEQV

SEQ ID NO: 4008 - protein, 9 aa, Homo sapiens
LLNEQELQL

SEQ ID NO: 4009 - protein, 9 aa, Homo sapiens
LLNPVVEFV

SEQ ID NO: 4010 - protein, 9 aa, Homo sapiens
LLPDNFIAA

SEQ ID NO: 4011 - protein, 9 aa, Homo sapiens
LLPDNVHYV

SEQ ID NO: 4012 - protein, 9 aa, Homo sapiens
LLPEGPPAI

SEQ ID NO: 4013 - protein, 9 aa, Homo sapiens
LLPISPFML

SEQ ID NO: 4014 - protein, 11 aa, Homo sapiens
LLPPLESLATV

SEQ ID NO: 4015 - protein, 9 aa, Homo sapiens
LLPPPPCPA

SEQ ID NO: 4016 - protein, 11 aa, Homo sapiens
LLQDGEFSMDL

SEQ ID NO: 4017 - protein, 9 aa, Homo sapiens
LLREVGTAL

SEQ ID NO: 4018 - protein, 9 aa, Homo sapiens
LLSHVIVAL

SEQ ID NO: 4019 - protein, 9 aa, Homo sapiens
LLSPVVPQI

SEQ ID NO: 4020 - protein, 11 aa, Homo sapiens
LLVPTSGIYFV

SEQ ID NO: 4021 - protein, 9 aa, Homo sapiens
LLVSGFWGV

SEQ ID NO: 4022 - protein, 8 aa, Homo sapiens
LLWDYVYQ

SEQ ID NO: 4023 - protein, 9 aa, Homo sapiens
LLWDYVYQL

SEQ ID NO: 4024 - protein, 9 aa, Homo sapiens
LLWERVEKL

SEQ ID NO: 4025 - protein, 9 aa, Homo sapiens
LLWGNLPEI

SEQ ID NO: 4026 - protein, 10 aa, Homo sapiens
LLWPGAALLV

SEQ ID NO: 4027 - protein, 10 aa, Homo sapiens
LLYTGDLEAL

SEQ ID NO: 4028 - protein, 9 aa, Homo sapiens
LLYYQTNYL

SEQ ID NO: 4029 - protein, 9 aa, Homo sapiens
LMAPYTPFL

SEQ ID NO: 4030 - protein, 9 aa, Homo sapiens
LMDHTIPEV

SEQ ID NO: 4031 - protein, 9 aa, Homo sapiens
LMYPYIFHV

SEQ ID NO: 4032 - protein, 9 aa, Homo sapiens
LSLENLEKI

SEQ ID NO: 4033 - protein, 9 aa, Homo sapiens
LSLMLVSTV

SEQ ID NO: 4034 - protein, 10 aa, Homo sapiens
LTIEDGIFEV

SEQ ID NO: 4035 - protein, 9 aa, Homo sapiens
MALLFSLIL

SEQ ID NO: 4036 - protein, 9 aa, Homo sapiens
MIAQTVTAV

SEQ ID NO: 4037 - protein, 9 aa, Homo sapiens
MISELEVRL

SEQ ID NO: 4038 - protein, 9 aa, Homo sapiens
MITPFLPVV

SEQ ID NO: 4039 - protein, 9 aa, Homo sapiens
MLAEKLPNL

SEQ ID NO: 4040 - protein, 9 aa, Homo sapiens
MLDMSVPAV

SEQ ID NO: 4041 - protein, 9 aa, Homo sapiens
MLDSLRIYL

SEQ ID NO: 4042 - protein, 9 aa, Homo sapiens
MLEVALTLI

SEQ ID NO: 4043 - protein, 11 aa, Homo sapiens
MLFGHPLLVSV

SEQ ID NO: 4044 - protein, 10 aa, Homo sapiens
MLGVNQGEGL

SEQ ID NO: 4045 - protein, 9 aa, Homo sapiens
MLHSVTLFL

SEQ ID NO: 4046 - protein, 9 aa, Homo sapiens
MLIGEIFEL

SEQ ID NO: 4047 - protein, 11 aa, Homo sapiens
MLLATLLLLLL

SEQ ID NO: 4048 - protein, 8 aa, Homo sapiens
MLLENIIL

SEQ ID NO: 4049 - protein, 10 aa, Homo sapiens
MLLPASDPLL

SEQ ID NO: 4050 - protein, 10 aa, Homo sapiens
MLLPGPLHSL

SEQ ID NO: 4051 - protein, 9 aa, Homo sapiens
MLYDIVPVV

SEQ ID NO: 4052 - protein, 12 aa, Homo sapiens
MMDQARSAFSNL

SEQ ID NO: 4053 - protein, 10 aa, Homo sapiens
MMHFKSGLEL

SEQ ID NO: 4054 - protein, 8 aa, Homo sapiens
MMPTPVIL

SEQ ID NO: 4055 - protein, 9 aa, Homo sapiens
MMPTPVILL

SEQ ID NO: 4056 - protein, 10 aa, Homo sapiens
MMTAKAVDKI

SEQ ID NO: 4057 - protein, 9 aa, Homo sapiens
MTDKAPPGV

SEQ ID NO: 4058 - protein, 8 aa, Homo sapiens
MVDGTLLL

SEQ ID NO: 4059 - protein, 9 aa, Homo sapiens
NIFPYPVGV

SEQ ID NO: 4060 - protein, 9 aa, Homo sapiens
NLAKCIVSV

SEQ ID NO: 4061 - protein, 9 aa, Homo sapiens
NLASFIEQV

SEQ ID NO: 4062 - protein, 9 aa, Homo sapiens
NLFDRVVTL

SEQ ID NO: 4063 - protein, 9 aa, Homo sapiens
NLFNKYPAL

SEQ ID NO: 4064 - protein, 10 aa, Homo sapiens
NLIDLDDLYV

SEQ ID NO: 4065 - protein, 9 aa, Homo sapiens
NLINQEIML

SEQ ID NO: 4066 - protein, 9 aa, Homo sapiens
NLISALEEA

SEQ ID NO: 4067 - protein, 11 aa, Homo sapiens
NLLDDRGMTAL

SEQ ID NO: 4068 - protein, 9 aa, Homo sapiens
NLLEEVFHL

SEQ ID NO: 4069 - protein, 9 aa, Homo sapiens
NLLKLIAEV

SEQ ID NO: 4070 - protein, 9 aa, Homo sapiens
NLLTHIENV

SEQ ID NO: 4071 - protein, 9 aa, Homo sapiens
NLVAIPVYV

SEQ ID NO: 4072 - protein, 9 aa, Homo sapiens
NLVSFLETV

SEQ ID NO: 4073 - protein, 9 aa, Homo sapiens
NLYPETFAL

SEQ ID NO: 4074 - protein, 10 aa, Homo sapiens
NMFGTKFETV

SEQ ID NO: 4075 - protein, 10 aa, Homo sapiens
NQIGAKFWEV

SEQ ID NO: 4076 - protein, 8 aa, Homo sapiens
PLAKIIPI

SEQ ID NO: 4077 - protein, 10 aa, Homo sapiens
PLMLPPPLEL

SEQ ID NO: 4078 - protein, 9 aa, Homo sapiens
PLPVQVFNL

SEQ ID NO: 4079 - protein, 9 aa, Homo sapiens
QLAIPVSSL

SEQ ID NO: 4080 - protein, 9 aa, Homo sapiens
QLFQGVLTL

SEQ ID NO: 4081 - protein, 9 aa, Homo sapiens
QLIKELPEL

SEQ ID NO: 4082 - protein, 9 aa, Homo sapiens
QLIPKLIFL

SEQ ID NO: 4083 - protein, 9 aa, Homo sapiens
QLLEKVPTL

SEQ ID NO: 4084 - protein, 9 aa, Homo sapiens
QLLPLIVNL

SEQ ID NO: 4085 - protein, 9 aa, Homo sapiens
QLMEQVAQL

SEQ ID NO: 4086 - protein, 9 aa, Homo sapiens
QLMQQMIQL

SEQ ID NO: 4087 - protein, 9 aa, Homo sapiens
QLMREVLLL

SEQ ID NO: 4088 - protein, 9 aa, Homo sapiens
QLQEELEKV

SEQ ID NO: 4089 - protein, 9 aa, Homo sapiens
QLQPGNAKL

SEQ ID NO: 4090 - protein, 9 aa, Homo sapiens
QLSPRLLEV

SEQ ID NO: 4091 - protein, 9 aa, Homo sapiens
QLSPVLLYL

SEQ ID NO: 4092 - protein, 9 aa, Homo sapiens
QLWNNYFHL

SEQ ID NO: 4093 - protein, 9 aa, Homo sapiens
QLYNQIIKL

SEQ ID NO: 4094 - protein, 9 aa, Homo sapiens
QMISRIEYV

SEQ ID NO: 4095 - protein, 9 aa, Homo sapiens
QQIDRVVEV

SEQ ID NO: 4096 - protein, 9 aa, Homo sapiens
QQIGKVVQV

SEQ ID NO: 4097 - protein, 8 aa, Homo sapiens
VIPVLPQV

SEQ ID NO: 4098 - protein, 9 aa, Homo sapiens
RIIDTVAQV

SEQ ID NO: 4099 - protein, 9 aa, Homo sapiens
RIPAYFVTV

SEQ ID NO: 4100 - protein, 9 aa, Homo sapiens
RIRPTAVTL

SEQ ID NO: 4101 - protein, 9 aa, Homo sapiens
RLAHYIDRV

SEQ ID NO: 4102 - protein, 11 aa, Homo sapiens
RLAHYNKRSTI

SEQ ID NO: 4103 - protein, 9 aa, Homo sapiens
RLAPAQWFL

SEQ ID NO: 4104 - protein, 9 aa, Homo sapiens
RLDDAIHVL

SEQ ID NO: 4105 - protein, 9 aa, Homo sapiens
RLDEAFDFV

SEQ ID NO: 4106 - protein, 11 aa, Homo sapiens
RLFDDSTVTTV

SEQ ID NO: 4107 - protein, 11 aa, Homo sapiens
RLFDEPQLASL

SEQ ID NO: 4108 - protein, 9 aa, Homo sapiens
RLFDQAFGL

SEQ ID NO: 4109 - protein, 9 aa, Homo sapiens
RLFHKTVYL

SEQ ID NO: 4110 - protein, 10 aa, Homo sapiens
RLFNDPVAMV

SEQ ID NO: 4111 - protein, 10 aa, Homo sapiens
RLFPGAPPTA

SEQ ID NO: 4112 - protein, 9 aa, Homo sapiens
RLFSSIVTV

SEQ ID NO: 4113 - protein, 9 aa, Homo sapiens
RLHEKIQEA

SEQ ID NO: 4114 - protein, 9 aa, Homo sapiens
RLIAQRYLL

SEQ ID NO: 4115 - protein, 9 aa, Homo sapiens
RLIDLGVGL

SEQ ID NO: 4116 - protein, 10 aa, Homo sapiens
RLIDLPGTEL

SEQ ID NO: 4117 - protein, 9 aa, Homo sapiens
RLIEETISI

SEQ ID NO: 4118 - protein, 10 aa, Homo sapiens
RLIEETQIFQ

SEQ ID NO: 4119 - protein, 11 aa, Homo sapiens
RLIEETQIFQM

SEQ ID NO: 4120 - protein, 9 aa, Homo sapiens
RLIEQEEYL

SEQ ID NO: 4121 - protein, 8 aa, Homo sapiens
RLIESLFT

SEQ ID NO: 4122 - protein, 9 aa, Homo sapiens
RLIESLFTI

SEQ ID NO: 4123 - protein, 9 aa, Homo sapiens
RLIEVTETI

SEQ ID NO: 4124 - protein, 11 aa, Homo sapiens
RLIGDAAKNQV

SEQ ID NO: 4125 - protein, 9 aa, Homo sapiens
RLINQVLEL

SEQ ID NO: 4126 - protein, 9 aa, Homo sapiens
RLIPIIVLL

SEQ ID NO: 4127 - protein, 9 aa, Homo sapiens
RLIPTLVSI

SEQ ID NO: 4128 - protein, 9 aa, Homo sapiens
RLISKFDTV

SEQ ID NO: 4129 - protein, 10 aa, Homo sapiens
RLLDLENIQI

SEQ ID NO: 4130 - protein, 9 aa, Homo sapiens
RLLDLENSL

SEQ ID NO: 4131 - protein, 9 aa, Homo sapiens
RLLDRKVLL

SEQ ID NO: 4132 - protein, 9 aa, Homo sapiens
RLLDYVATV

SEQ ID NO: 4133 - protein, 9 aa, Homo sapiens
RLLEATSYL

SEQ ID NO: 4134 - protein, 9 aa, Homo sapiens
RLLETVIDV

SEQ ID NO: 4135 - protein, 9 aa, Homo sapiens
RLLEVPVML

SEQ ID NO: 4136 - protein, 9 aa, Homo sapiens
RLLGYVATL

SEQ ID NO: 4137 - protein, 9 aa, Homo sapiens
RLLHEMILV

SEQ ID NO: 4138 - protein, 9 aa, Homo sapiens
RLLLPGELA

SEQ ID NO: 4139 - protein, 12 aa, Homo sapiens
RLLLPGELAKHA

SEQ ID NO: 4140 - protein, 11 aa, Homo sapiens
RLLPPGAVVAV

SEQ ID NO: 4141 - protein, 9 aa, Homo sapiens
RLLPQVDSV

SEQ ID NO: 4142 - protein, 9 aa, Homo sapiens
RLLPVIFLV

SEQ ID NO: 4143 - protein, 11 aa, Homo sapiens
RLLQDSVDFSL

SEQ ID NO: 4144 - protein, 9 aa, Homo sapiens
RLLQTLPQL

SEQ ID NO: 4145 - protein, 9 aa, Homo sapiens
RLMDNSTSV

SEQ ID NO: 4146 - protein, 9 aa, Homo sapiens
RLMNDMTAV

SEQ ID NO: 4147 - protein, 9 aa, Homo sapiens
RLMNETTAV

SEQ ID NO: 4148 - protein, 11 aa, Homo sapiens
RLMNETTAVAL

SEQ ID NO: 4149 - protein, 9 aa, Homo sapiens
RLNEAAVTV

SEQ ID NO: 4150 - protein, 10 aa, Homo sapiens
RLPDDDPTAV

SEQ ID NO: 4151 - protein, 9 aa, Homo sapiens
RLPDLIIFL

SEQ ID NO: 4152 - protein, 9 aa, Homo sapiens
RLPEAIEEV

SEQ ID NO: 4153 - protein, 9 aa, Homo sapiens
RLPEIYIQL

SEQ ID NO: 4154 - protein, 9 aa, Homo sapiens
RLPPPFPGL

SEQ ID NO: 4155 - protein, 9 aa, Homo sapiens
RLQEDLQSV

SEQ ID NO: 4156 - protein, 9 aa, Homo sapiens
RLQEEVHLL

SEQ ID NO: 4157 - protein, 11 aa, Homo sapiens
RLQEGDKILSV

SEQ ID NO: 4158 - protein, 9 aa, Homo sapiens
RLSDAQIYV

SEQ ID NO: 4159 - protein, 9 aa, Homo sapiens
RLSEAIVTV

SEQ ID NO: 4160 - protein, 10 aa, Homo sapiens
RLSEFIPAVF

SEQ ID NO: 4161 - protein, 9 aa, Homo sapiens
RLSEVQASL

SEQ ID NO: 4162 - protein, 9 aa, Homo sapiens
RLTDYVAFL

SEQ ID NO: 4163 - protein, 9 aa, Homo sapiens
RLVPFLVEL

SEQ ID NO: 4164 - protein, 9 aa, Homo sapiens
RLVPFLVFV

SEQ ID NO: 4165 - protein, 11 aa, Homo sapiens
RLWDHATMTEV

SEQ ID NO: 4166 - protein, 9 aa, Homo sapiens
RLWGEPVNL

SEQ ID NO: 4167 - protein, 11 aa, Homo sapiens
RLWNMPENNGL

SEQ ID NO: 4168 - protein, 9 aa, Homo sapiens
RLWPKIQGL

SEQ ID NO: 4169 - protein, 9 aa, Homo sapiens
RLYHELVGL

SEQ ID NO: 4170 - protein, 11 aa, Homo sapiens
RLYSGISGLEL

SEQ ID NO: 4171 - protein, 9 aa, Homo sapiens
RMFGIPVVV

SEQ ID NO: 4172 - protein, 11 aa, Homo sapiens
RQLEEEGITFV

SEQ ID NO: 4173 - protein, 10 aa, Homo sapiens
RQYPWGVVQV

SEQ ID NO: 4174 - protein, 9 aa, Homo sapiens
RTIGVITKL

SEQ ID NO: 4175 - protein, 9 aa, Homo sapiens
RVMPSSFFL

SEQ ID NO: 4176 - protein, 9 aa, Homo sapiens
RVPPVPPNV

SEQ ID NO: 4177 - protein, 8 aa, Homo sapiens
RVSDINFT

SEQ ID NO: 4178 - protein, 11 aa, Homo sapiens
RVWDISTVSSV

SEQ ID NO: 4179 - protein, 9 aa, Homo sapiens
RVYERLLYV

SEQ ID NO: 4180 - protein, 9 aa, Homo sapiens
SAFPFPVTV

SEQ ID NO: 4181 - protein, 9 aa, Homo sapiens
SIIEYLPTL

SEQ ID NO: 4182 - protein, 9 aa, Homo sapiens
SIISNLITV

SEQ ID NO: 4183 - protein, 9 aa, Homo sapiens
SILEAVPQV

SEQ ID NO: 4184 - protein, 9 aa, Homo sapiens
SILEHQIQV

SEQ ID NO: 4185 - protein, 9 aa, Homo sapiens
SILHDVVEV

SEQ ID NO: 4186 - protein, 9 aa, Homo sapiens
SILSSLTSV

SEQ ID NO: 4187 - protein, 9 aa, Homo sapiens
SIRDFLVTL

SEQ ID NO: 4188 - protein, 9 aa, Homo sapiens
SISPIVLYL

SEQ ID NO: 4189 - protein, 10 aa, Homo sapiens
SIYGGFLLGV

SEQ ID NO: 4190 - protein, 9 aa, Homo sapiens
SIYPSPTGV

SEQ ID NO: 4191 - protein, 9 aa, Homo sapiens
SLAADIPRL

SEQ ID NO: 4192 - protein, 8 aa, Homo sapiens
SLAALKKA

SEQ ID NO: 4193 - protein, 10 aa, Homo sapiens
SLAALKKALA

SEQ ID NO: 4194 - protein, 11 aa, Homo sapiens
SLAALKKALAA

SEQ ID NO: 4195 - protein, 12 aa, Homo sapiens
SLAALKKALAAA

SEQ ID NO: 4196 - protein, 10 aa, Homo sapiens
SLADLQNDEV

SEQ ID NO: 4197 - protein, 9 aa, Homo sapiens
SLAEVLQQL

SEQ ID NO: 4198 - protein, 11 aa, Homo sapiens
SLAGDVALQQL

SEQ ID NO: 4199 - protein, 9 aa, Homo sapiens
SLAPLFFKL

SEQ ID NO: 4200 - protein, 9 aa, Homo sapiens
SLAQYLINA

SEQ ID NO: 4201 - protein, 9 aa, Homo sapiens
SLAWDVPAA

SEQ ID NO: 4202 - protein, 11 aa, Homo sapiens
SLDAAAGMLYL

SEQ ID NO: 4203 - protein, 10 aa, Homo sapiens
SLDDLQPWHS

SEQ ID NO: 4204 - protein, 9 aa, Homo sapiens
SLDKFLASV

SEQ ID NO: 4205 - protein, 11 aa, Homo sapiens
SLDKFLASVST

SEQ ID NO: 4206 - protein, 9 aa, Homo sapiens
SLDKTSHSV

SEQ ID NO: 4207 - protein, 9 aa, Homo sapiens
SLFERLVVL

SEQ ID NO: 4208 - protein, 9 aa, Homo sapiens
SLFNKLVEL

SEQ ID NO: 4209 - protein, 10 aa, Homo sapiens
SLFPGKLEVV

SEQ ID NO: 4210 - protein, 9 aa, Homo sapiens
SLHDAIMIV

SEQ ID NO: 4211 - protein, 10 aa, Homo sapiens
SLHPDLIYNV

SEQ ID NO: 4212 - protein, 9 aa, Homo sapiens
SLIAKVATA

SEQ ID NO: 4213 - protein, 9 aa, Homo sapiens
SLIDADPYL

SEQ ID NO: 4214 - protein, 9 aa, Homo sapiens
SLIDGYYRL

SEQ ID NO: 4215 - protein, 9 aa, Homo sapiens
SLIDIVTEI

SEQ ID NO: 4216 - protein, 10 aa, Homo sapiens
SLINVGLISV

SEQ ID NO: 4217 - protein, 9 aa, Homo sapiens
SLIPTSPQV

SEQ ID NO: 4218 - protein, 9 aa, Homo sapiens
SLIRNLEQL

SEQ ID NO: 4219 - protein, 9 aa, Homo sapiens
SLISTILEV

SEQ ID NO: 4220 - protein, 9 aa, Homo sapiens
SLISVIHLI

SEQ ID NO: 4221 - protein, 9 aa, Homo sapiens
SLITRLLEV

SEQ ID NO: 4222 - protein, 10 aa, Homo sapiens
SLKEEVGEEA

SEQ ID NO: 4223 - protein, 11 aa, Homo sapiens
SLKEEVGEEAI

SEQ ID NO: 4224 - protein, 9 aa, Homo sapiens
SLLASLHTL

SEQ ID NO: 4225 - protein, 9 aa, Homo sapiens
SLLDEFYKL

SEQ ID NO: 4226 - protein, 10 aa, Homo sapiens
SLLDGVVEKL

SEQ ID NO: 4227 - protein, 8 aa, Homo sapiens
SLLDRFLA

SEQ ID NO: 4228 - protein, 9 aa, Homo sapiens
SLLDRFLAT

SEQ ID NO: 4229 - protein, 10 aa, Homo sapiens
SLLDRFLATV

SEQ ID NO: 4230 - protein, 9 aa, Homo sapiens
SLLDSCTKL

SEQ ID NO: 4231 - protein, 9 aa, Homo sapiens
SLLEPFVYL

SEQ ID NO: 4232 - protein, 11 aa, Homo sapiens
SLLGDDALVQV

SEQ ID NO: 4233 - protein, 9 aa, Homo sapiens
SLLGHLMIV

SEQ ID NO: 4234 - protein, 11 aa, Homo sapiens
SLLHLGALYGI

SEQ ID NO: 4235 - protein, 9 aa, Homo sapiens
SLLPFLKAV

SEQ ID NO: 4236 - protein, 10 aa, Homo sapiens
SLLPVKPVEI

SEQ ID NO: 4237 - protein, 9 aa, Homo sapiens
SLLPYLPML

SEQ ID NO: 4238 - protein, 9 aa, Homo sapiens
SLLRSIFTV

SEQ ID NO: 4239 - protein, 9 aa, Homo sapiens
SLLSHVEQL

SEQ ID NO: 4240 - protein, 9 aa, Homo sapiens
SLLSNDLKL

SEQ ID NO: 4241 - protein, 9 aa, Homo sapiens
SLLYNVPAV

SEQ ID NO: 4242 - protein, 10 aa, Homo sapiens
SLMDHTIPEV

SEQ ID NO: 4243 - protein, 11 aa, Homo sapiens
SLMEPPAVLLL

SEQ ID NO: 4244 - protein, 9 aa, Homo sapiens
SLMMTIINL

SEQ ID NO: 4245 - protein, 9 aa, Homo sapiens
SLMSHAIEL

SEQ ID NO: 4246 - protein, 10 aa, Homo sapiens
SLPDFGISYV

SEQ ID NO: 4247 - protein, 10 aa, Homo sapiens
SLPSARPLSL

SEQ ID NO: 4248 - protein, 9 aa, Homo sapiens
SLQERQVFL

SEQ ID NO: 4249 - protein, 9 aa, Homo sapiens
SLQSTILGV

SEQ ID NO: 4250 - protein, 9 aa, Homo sapiens
SLSEKQYFL

SEQ ID NO: 4251 - protein, 9 aa, Homo sapiens
SLTGHISTV

SEQ ID NO: 4252 - protein, 9 aa, Homo sapiens
SLVAILQSV

SEQ ID NO: 4253 - protein, 9 aa, Homo sapiens
SLVATLQSL

SEQ ID NO: 4254 - protein, 9 aa, Homo sapiens
SLVDGYFRL

SEQ ID NO: 4255 - protein, 9 aa, Homo sapiens
SLVDTVYAL

SEQ ID NO: 4256 - protein, 9 aa, Homo sapiens
SLVSKGTLV

SEQ ID NO: 4257 - protein, 11 aa, Homo sapiens
SLVSKGTLVQT

SEQ ID NO: 4258 - protein, 11 aa, Homo sapiens
SLVSPASYENV

SEQ ID NO: 4259 - protein, 9 aa, Homo sapiens
SLWFKPEEL

SEQ ID NO: 4260 - protein, 9 aa, Homo sapiens
SLWHLPLLL

SEQ ID NO: 4261 - protein, 9 aa, Homo sapiens
SLWPMTFGL

SEQ ID NO: 4262 - protein, 9 aa, Homo sapiens
SLYASGRTT

SEQ ID NO: 4263 - protein, 9 aa, Homo sapiens
SLYDYNPNL

SEQ ID NO: 4264 - protein, 9 aa, Homo sapiens
SLYKGLLSV

SEQ ID NO: 4265 - protein, 9 aa, Homo sapiens
SLYREILFL

SEQ ID NO: 4266 - protein, 11 aa, Homo sapiens
SMADIPLGFGV

SEQ ID NO: 4267 - protein, 9 aa, Homo sapiens
SMTLVNVLV

SEQ ID NO: 4268 - protein, 9 aa, Homo sapiens
SNIDKSLYV

SEQ ID NO: 4269 - protein, 9 aa, Homo sapiens
SQDPGTHVV

SEQ ID NO: 4270 - protein, 9 aa, Homo sapiens
SQLPFKVEA

SEQ ID NO: 4271 - protein, 8 aa, Homo sapiens
SVALLMNL

SEQ ID NO: 4272 - protein, 9 aa, Homo sapiens
SVDWPESSL

SEQ ID NO: 4273 - protein, 9 aa, Homo sapiens
SVIEQIVYV

SEQ ID NO: 4274 - protein, 11 aa, Homo sapiens
TEVLKTHGLLV

SEQ ID NO: 4275 - protein, 9 aa, Homo sapiens
TILPKVMQV

SEQ ID NO: 4276 - protein, 9 aa, Homo sapiens
TLADIIARL

SEQ ID NO: 4277 - protein, 9 aa, Homo sapiens
TLDDLIAAV

SEQ ID NO: 4278 - protein, 9 aa, Homo sapiens
TLDEATPTL

SEQ ID NO: 4279 - protein, 9 aa, Homo sapiens
TLFPVRLLV

SEQ ID NO: 4280 - protein, 9 aa, Homo sapiens
TLGNVLVTV

SEQ ID NO: 4281 - protein, 10 aa, Homo sapiens
TLHGLQQYYV

SEQ ID NO: 4282 - protein, 9 aa, Homo sapiens
TLIDSLDTL

SEQ ID NO: 4283 - protein, 9 aa, Homo sapiens
TLIEDILGV

SEQ ID NO: 4284 - protein, 9 aa, Homo sapiens
TLIPYYISV

SEQ ID NO: 4285 - protein, 9 aa, Homo sapiens
TLISDIEAV

SEQ ID NO: 4286 - protein, 9 aa, Homo sapiens
TLISELVQA

SEQ ID NO: 4287 - protein, 11 aa, Homo sapiens
TLLAAEFLKQV

SEQ ID NO: 4288 - protein, 11 aa, Homo sapiens
TLLDPNEKYLL

SEQ ID NO: 4289 - protein, 9 aa, Homo sapiens
TLLEKDYFL

SEQ ID NO: 4290 - protein, 9 aa, Homo sapiens
TLLKKVWKV

SEQ ID NO: 4291 - protein, 9 aa, Homo sapiens
TLLNSTLFL

SEQ ID NO: 4292 - protein, 9 aa, Homo sapiens
TLLPLRVFL

SEQ ID NO: 4293 - protein, 9 aa, Homo sapiens
TLLRLLYEA

SEQ ID NO: 4294 - protein, 9 aa, Homo sapiens
TLMGHMLYL

SEQ ID NO: 4295 - protein, 9 aa, Homo sapiens
TLNNLEIFL

SEQ ID NO: 4296 - protein, 9 aa, Homo sapiens
TLQEVHFLL

SEQ ID NO: 4297 - protein, 9 aa, Homo sapiens
TLSDIMVSL

SEQ ID NO: 4298 - protein, 9 aa, Homo sapiens
TLSDIVVTL

SEQ ID NO: 4299 - protein, 9 aa, Homo sapiens
TLSEVTNQL

SEQ ID NO: 4300 - protein, 9 aa, Homo sapiens
TLVDFPLHL

SEQ ID NO: 4301 - protein, 9 aa, Homo sapiens
TLVGSLPLL

SEQ ID NO: 4302 - protein, 9 aa, Homo sapiens
TLYNTEVLL

SEQ ID NO: 4303 - protein, 9 aa, Homo sapiens
TMLARLASA

SEQ ID NO: 4304 - protein, 8 aa, Homo sapiens
TTAEREIV

SEQ ID NO: 4305 - protein, 9 aa, Homo sapiens
TTFKNLQTV

SEQ ID NO: 4306 - protein, 9 aa, Homo sapiens
TTFPRPVTV

SEQ ID NO: 4307 - protein, 12 aa, Homo sapiens
TTLLLPISPFML

SEQ ID NO: 4308 - protein, 10 aa, Homo sapiens
TVFPAGLANV

SEQ ID NO: 4309 - protein, 12 aa, Homo sapiens
TVGGTAYAIYEL

SEQ ID NO: 4310 - protein, 9 aa, Homo sapiens
TVLDAIYEV

SEQ ID NO: 4311 - protein, 9 aa, Homo sapiens
TVLPFVSTV

SEQ ID NO: 4312 - protein, 9 aa, Homo sapiens
TVMGKIFAV

SEQ ID NO: 4313 - protein, 11 aa, Homo sapiens
TVWPTMITPML

SEQ ID NO: 4314 - protein, 9 aa, Homo sapiens
VALEHFVLV

SEQ ID NO: 4315 - protein, 8 aa, Homo sapiens
VAPEEHPV

SEQ ID NO: 4316 - protein, 9 aa, Homo sapiens
VFDNYSANV

SEQ ID NO: 4317 - protein, 10 aa, Homo sapiens
VIADGGIQNV

SEQ ID NO: 4318 - protein, 9 aa, Homo sapiens
VILHHEYFL

SEQ ID NO: 4319 - protein, 9 aa, Homo sapiens
VILPTVHEV

SEQ ID NO: 4320 - protein, 9 aa, Homo sapiens
VLADQVWTL

SEQ ID NO: 4321 - protein, 9 aa, Homo sapiens
VLAETLTQV

SEQ ID NO: 4322 - protein, 9 aa, Homo sapiens
VLAPLVIYL

SEQ ID NO: 4323 - protein, 9 aa, Homo sapiens
VLAWGLLNV

SEQ ID NO: 4324 - protein, 9 aa, Homo sapiens
VLAYFLPEA

SEQ ID NO: 4325 - protein, 9 aa, Homo sapiens
VLDDKLYVV

SEQ ID NO: 4326 - protein, 9 aa, Homo sapiens
VLFGKPMVV

SEQ ID NO: 4327 - protein, 9 aa, Homo sapiens
VLFGLLREV

SEQ ID NO: 4328 - protein, 9 aa, Homo sapiens
VLFPMDLAL

SEQ ID NO: 4329 - protein, 11 aa, Homo sapiens
VLFSSPPVILL

SEQ ID NO: 4330 - protein, 9 aa, Homo sapiens
VLIANLEKL

SEQ ID NO: 4331 - protein, 9 aa, Homo sapiens
VLIDHDVDL

SEQ ID NO: 4332 - protein, 9 aa, Homo sapiens
VLIDVLKEL

SEQ ID NO: 4333 - protein, 10 aa, Homo sapiens
VLIEGSINSV

SEQ ID NO: 4334 - protein, 10 aa, Homo sapiens
VLIGEFLEKV

SEQ ID NO: 4335 - protein, 10 aa, Homo sapiens
VLIKNLLVSV

SEQ ID NO: 4336 - protein, 10 aa, Homo sapiens
VLINDADWEL

SEQ ID NO: 4337 - protein, 9 aa, Homo sapiens
VLIQDVPTL

SEQ ID NO: 4338 - protein, 9 aa, Homo sapiens
VLISKLPYI

SEQ ID NO: 4339 - protein, 9 aa, Homo sapiens
VLLDAPIQL

SEQ ID NO: 4340 - protein, 9 aa, Homo sapiens
VLLDSVEKL

SEQ ID NO: 4341 - protein, 10 aa, Homo sapiens
VLLDYHLNYL

SEQ ID NO: 4342 - protein, 9 aa, Homo sapiens
VLLESEQFL

SEQ ID NO: 4343 - protein, 12 aa, Homo sapiens
VLLESEQFLTEL

SEQ ID NO: 4344 - protein, 8 aa, Homo sapiens
VLLGHIFY

SEQ ID NO: 4345 - protein, 9 aa, Homo sapiens
VLLQIVHFL

SEQ ID NO: 4346 - protein, 9 aa, Homo sapiens
VLLSHLSYL

SEQ ID NO: 4347 - protein, 10 aa, Homo sapiens
VLLSIPFVSV

SEQ ID NO: 4348 - protein, 10 aa, Homo sapiens
VLMDRLPSLL

SEQ ID NO: 4349 - protein, 10 aa, Homo sapiens
VLMEKPDVVV

SEQ ID NO: 4350 - protein, 9 aa, Homo sapiens
VLMENIVYL

SEQ ID NO: 4351 - protein, 9 aa, Homo sapiens
VLMGSLVYL

SEQ ID NO: 4352 - protein, 9 aa, Homo sapiens
VLMLQEPLL

SEQ ID NO: 4353 - protein, 9 aa, Homo sapiens
VLMPWIHEL

SEQ ID NO: 4354 - protein, 10 aa, Homo sapiens
VLPNFLPYNV

SEQ ID NO: 4355 - protein, 8 aa, Homo sapiens
VLQDIQVM

SEQ ID NO: 4356 - protein, 9 aa, Homo sapiens
VLQDIQVML

SEQ ID NO: 4357 - protein, 9 aa, Homo sapiens
VLQEKIEVV

SEQ ID NO: 4358 - protein, 9 aa, Homo sapiens
VLQGKLAEV

SEQ ID NO: 4359 - protein, 9 aa, Homo sapiens
VLSDIIQNL

SEQ ID NO: 4360 - protein, 11 aa, Homo sapiens
VLSDIIQNLSV

SEQ ID NO: 4361 - protein, 11 aa, Homo sapiens
VLSGGTTMYPG

SEQ ID NO: 4362 - protein, 9 aa, Homo sapiens
VLSNVEVTL

SEQ ID NO: 4363 - protein, 9 aa, Homo sapiens
VLTGILEQV

SEQ ID NO: 4364 - protein, 9 aa, Homo sapiens
VLTGLSIRL

SEQ ID NO: 4365 - protein, 9 aa, Homo sapiens
VLTSVTEAL

SEQ ID NO: 4366 - protein, 10 aa, Homo sapiens
VLVPYEPPQV

SEQ ID NO: 4367 - protein, 9 aa, Homo sapiens
VLWAGTPMV

SEQ ID NO: 4368 - protein, 8 aa, Homo sapiens
VLWDRTFS

SEQ ID NO: 4369 - protein, 10 aa, Homo sapiens
VLWDRTFSLF

SEQ ID NO: 4370 - protein, 9 aa, Homo sapiens
VLWFKPVEL

SEQ ID NO: 4371 - protein, 9 aa, Homo sapiens
VLWKEILFL

SEQ ID NO: 4372 - protein, 9 aa, Homo sapiens
VLWPLPAYL

SEQ ID NO: 4373 - protein, 11 aa, Homo sapiens
VLYEEVEELRL

SEQ ID NO: 4374 - protein, 11 aa, Homo sapiens
VLYNEIEYAQA

SEQ ID NO: 4375 - protein, 9 aa, Homo sapiens
VLYNESLQL

SEQ ID NO: 4376 - protein, 9 aa, Homo sapiens
VLYSVMTLV

SEQ ID NO: 4377 - protein, 8 aa, Homo sapiens
VMAPRALL

SEQ ID NO: 4378 - protein, 9 aa, Homo sapiens
VMIPTLPSI

SEQ ID NO: 4379 - protein, 9 aa, Homo sapiens
VMITKLVEV

SEQ ID NO: 4380 - protein, 10 aa, Homo sapiens
VMLETVPRSG

SEQ ID NO: 4381 - protein, 9 aa, Homo sapiens
VMTLVSTYL

SEQ ID NO: 4382 - protein, 9 aa, Homo sapiens
VMVTNLVEV

SEQ ID NO: 4383 - protein, 9 aa, Homo sapiens
VMVTTVPLV

SEQ ID NO: 4384 - protein, 9 aa, Homo sapiens
VQNDTLLQV

SEQ ID NO: 4385 - protein, 8 aa, Homo sapiens
VQSLPLPL

SEQ ID NO: 4386 - protein, 12 aa, Homo sapiens
VQSMDVAAFNKI

SEQ ID NO: 4387 - protein, 10 aa, Homo sapiens
VTSIAKAPAV

SEQ ID NO: 4388 - protein, 9 aa, Homo sapiens
VVAEFVPLI

SEQ ID NO: 4389 - protein, 9 aa, Homo sapiens
VVDQGSTNL

SEQ ID NO: 4390 - protein, 9 aa, Homo sapiens
VVLPAPPAV

SEQ ID NO: 4391 - protein, 9 aa, Homo sapiens
WIMPDNIFL

SEQ ID NO: 4392 - protein, 10 aa, Homo sapiens
WLLPYNGVTV

SEQ ID NO: 4393 - protein, 9 aa, Homo sapiens
WLMPVIPAL

SEQ ID NO: 4394 - protein, 9 aa, Homo sapiens
WLTPVIPAL

SEQ ID NO: 4395 - protein, 9 aa, Homo sapiens
WMLEQLRQV

SEQ ID NO: 4396 - protein, 9 aa, Homo sapiens
YAFAHILTV

SEQ ID NO: 4397 - protein, 9 aa, Homo sapiens
YAFNMKATV

SEQ ID NO: 4398 - protein, 9 aa, Homo sapiens
YAFPKAVSV

SEQ ID NO: 4399 - protein, 9 aa, Homo sapiens
YAYDGKDYL

SEQ ID NO: 4400 - protein, 9 aa, Homo sapiens
YFAERVTSL

SEQ ID NO: 4401 - protein, 11 aa, Homo sapiens
YFGSAFATPFL

SEQ ID NO: 4402 - protein, 9 aa, Homo sapiens
YIDDTLTMV

SEQ ID NO: 4403 - protein, 8 aa, Homo sapiens
YIFEEPFT

SEQ ID NO: 4404 - protein, 9 aa, Homo sapiens
YIFEEPFTI

SEQ ID NO: 4405 - protein, 9 aa, Homo sapiens
YLADIFTKL

SEQ ID NO: 4406 - protein, 9 aa, Homo sapiens
YLADLYHFV

SEQ ID NO: 4407 - protein, 9 aa, Homo sapiens
YLADTVQKL

SEQ ID NO: 4408 - protein, 9 aa, Homo sapiens
YLADVTNAL

SEQ ID NO: 4409 - protein, 10 aa, Homo sapiens
YLAEKYEWDV

SEQ ID NO: 4410 - protein, 10 aa, Homo sapiens
YLAELVTPIL

SEQ ID NO: 4411 - protein, 9 aa, Homo sapiens
YLAHFIEGL

SEQ ID NO: 4412 - protein, 9 aa, Homo sapiens
YLDAIKLLL

SEQ ID NO: 4413 - protein, 9 aa, Homo sapiens
YLDASLITV

SEQ ID NO: 4414 - protein, 9 aa, Homo sapiens
YLDNGVVFV

SEQ ID NO: 4415 - protein, 10 aa, Homo sapiens
YLDPSVLSGV

SEQ ID NO: 4416 - protein, 11 aa, Homo sapiens
YLDQTVVPILL

SEQ ID NO: 4417 - protein, 11 aa, Homo sapiens
YLEELPEKLKL

SEQ ID NO: 4418 - protein, 10 aa, Homo sapiens
YLFDRNGVCL

SEQ ID NO: 4419 - protein, 8 aa, Homo sapiens
YLFGERLL

SEQ ID NO: 4420 - protein, 8 aa, Homo sapiens
YLFHVQEV

SEQ ID NO: 4421 - protein, 9 aa, Homo sapiens
YLFNSVVNV

SEQ ID NO: 4422 - protein, 10 aa, Homo sapiens
YLFPATVVGV

SEQ ID NO: 4423 - protein, 9 aa, Homo sapiens
YLFPGIPEL

SEQ ID NO: 4424 - protein, 10 aa, Homo sapiens
YLFPGIPELL

SEQ ID NO: 4425 - protein, 9 aa, Homo sapiens
YLGDVSERV

SEQ ID NO: 4426 - protein, 9 aa, Homo sapiens
YLGEGPRMV

SEQ ID NO: 4427 - protein, 9 aa, Homo sapiens
YLGNINPQM

SEQ ID NO: 4428 - protein, 9 aa, Homo sapiens
YLHDFLKYL

SEQ ID NO: 4429 - protein, 11 aa, Homo sapiens
YLHDQNPDAAL

SEQ ID NO: 4430 - protein, 9 aa, Homo sapiens
YLHSQVVSV

SEQ ID NO: 4431 - protein, 9 aa, Homo sapiens
YLHSYLTYI

SEQ ID NO: 4432 - protein, 10 aa, Homo sapiens
YLIDEPSAYL

SEQ ID NO: 4433 - protein, 9 aa, Homo sapiens
YLIELIDRV

SEQ ID NO: 4434 - protein, 9 aa, Homo sapiens
YLIEPDVEL

SEQ ID NO: 4435 - protein, 9 aa, Homo sapiens
YLIKYIAIV

SEQ ID NO: 4436 - protein, 10 aa, Homo sapiens
YLIPDIDLKL

SEQ ID NO: 4437 - protein, 8 aa, Homo sapiens
YLIPLLER

SEQ ID NO: 4438 - protein, 9 aa, Homo sapiens
YLIPLLERL

SEQ ID NO: 4439 - protein, 9 aa, Homo sapiens
YLITLLEHL

SEQ ID NO: 4440 - protein, 9 aa, Homo sapiens
YLLDLHSYL

SEQ ID NO: 4441 - protein, 9 aa, Homo sapiens
YLLENGLNL

SEQ ID NO: 4442 - protein, 9 aa, Homo sapiens
YLLPKDIKL

SEQ ID NO: 4443 - protein, 8 aa, Homo sapiens
YLLPSVVL

SEQ ID NO: 4444 - protein, 9 aa, Homo sapiens
YLLPSVVLL

SEQ ID NO: 4445 - protein, 8 aa, Homo sapiens
YLLPYENL

SEQ ID NO: 4446 - protein, 9 aa, Homo sapiens
YLLPYENLL

SEQ ID NO: 4447 - protein, 9 aa, Homo sapiens
YLLQEIYGI

SEQ ID NO: 4448 - protein, 9 aa, Homo sapiens
YLMLPAPML

SEQ ID NO: 4449 - protein, 9 aa, Homo sapiens
YLNNVVEQL

SEQ ID NO: 4450 - protein, 9 aa, Homo sapiens
YLPAVFEEV

SEQ ID NO: 4451 - protein, 9 aa, Homo sapiens
YLPELLQTV

SEQ ID NO: 4452 - protein, 9 aa, Homo sapiens
YLPPATQVV

SEQ ID NO: 4453 - protein, 9 aa, Homo sapiens
YLQDKIYEV

SEQ ID NO: 4454 - protein, 10 aa, Homo sapiens
YLQEVPILTL

SEQ ID NO: 4455 - protein, 9 aa, Homo sapiens
YLQNWSHVL

SEQ ID NO: 4456 - protein, 9 aa, Homo sapiens
YLREQGKAL

SEQ ID NO: 4457 - protein, 10 aa, Homo sapiens
YLSDTTVTML

SEQ ID NO: 4458 - protein, 9 aa, Homo sapiens
YLSEATIGL

SEQ ID NO: 4459 - protein, 11 aa, Homo sapiens
YLSEDVFQHAV

SEQ ID NO: 4460 - protein, 9 aa, Homo sapiens
YLSEEVQAV

SEQ ID NO: 4461 - protein, 9 aa, Homo sapiens
YLSSVITTI

SEQ ID NO: 4462 - protein, 9 aa, Homo sapiens
YLTAEILEL

SEQ ID NO: 4463 - protein, 9 aa, Homo sapiens
YLTAEVLEL

SEQ ID NO: 4464 - protein, 9 aa, Homo sapiens
YLTHDSPSV

SEQ ID NO: 4465 - protein, 9 aa, Homo sapiens
YLTNVNTTV

SEQ ID NO: 4466 - protein, 9 aa, Homo sapiens
YLTPLILTL

SEQ ID NO: 4467 - protein, 9 aa, Homo sapiens
YLVPELDGV

SEQ ID NO: 4468 - protein, 9 aa, Homo sapiens
YLVPSDLTV

SEQ ID NO: 4469 - protein, 9 aa, Homo sapiens
YLVSHPNEV

SEQ ID NO: 4470 - protein, 9 aa, Homo sapiens
YLVSNVIEL

SEQ ID NO: 4471 - protein, 9 aa, Homo sapiens
YLVVKIEKV

SEQ ID NO: 4472 - protein, 10 aa, Homo sapiens
YLYGQTTTYL

SEQ ID NO: 4473 - protein, 9 aa, Homo sapiens
YLYNEGLSV

SEQ ID NO: 4474 - protein, 9 aa, Homo sapiens
YLYTDTVDL

SEQ ID NO: 4475 - protein, 9 aa, Homo sapiens
YMIDNVILL

SEQ ID NO: 4476 - protein, 9 aa, Homo sapiens
YMYHHPTSA

SEQ ID NO: 4477 - protein, 10 aa, Homo sapiens
YQKFLPLTQV

SEQ ID NO: 4478 - protein, 9 aa, Homo sapiens
YQLELRTTL

SEQ ID NO: 4479 - protein, 9 aa, Homo sapiens
YQTEIGQTL

SEQ ID NO: 4480 - protein, 9 aa, Homo sapiens
YQVGQLYSV

SEQ ID NO: 4481 - protein, 9 aa, Homo sapiens
YQYPRPLLI

SEQ ID NO: 4482 - protein, 9 aa, Homo sapiens
YTSPVNPAV

SEQ ID NO: 4483 - protein, 9 aa, Homo sapiens
YVINDLTAV

SEQ ID NO: 4484 - protein, 9 aa, Homo sapiens
YVLPVVSYI

SEQ ID NO: 4485 - protein, 8 aa, Homo sapiens
YVPRAILV

SEQ ID NO: 4486 - protein, 9 aa, Homo sapiens
YVSDLELSA

SEQ ID NO: 4487 - protein, 9 aa, Homo sapiens
YVYEYLLHV

SEQ ID NO: 4488 - protein, 9 aa, Homo sapiens
KASEKIFYV

SEQ ID NO: 4489 - protein, 9 aa, Homo sapiens
AAALIIHHV

SEQ ID NO: 4490 - protein, 11 aa, Homo sapiens
AAMAAQGEPQV

SEQ ID NO: 4491 - protein, 10 aa, Homo sapiens
AAMVYNEFIL

SEQ ID NO: 4492 - protein, 10 aa, Homo sapiens
AIIDGKIFCV

SEQ ID NO: 4493 - protein, 9 aa, Homo sapiens
AILEKMPLV

SEQ ID NO: 4494 - protein, 9 aa, Homo sapiens
AIMDIVIKV

SEQ ID NO: 4495 - protein, 9 aa, Homo sapiens
AIMDLLLRL

SEQ ID NO: 4496 - protein, 11 aa, Homo sapiens
ALAAPDIVPAL

SEQ ID NO: 4497 - protein, 10 aa, Homo sapiens
ALAASALPAL

SEQ ID NO: 4498 - protein, 9 aa, Homo sapiens
ALAATNPAV

SEQ ID NO: 4499 - protein, 11 aa, Homo sapiens
ALADFAELLRA

SEQ ID NO: 4500 - protein, 9 aa, Homo sapiens
ALADFLPVM

SEQ ID NO: 4501 - protein, 10 aa, Homo sapiens
ALADGVTMQV

SEQ ID NO: 4502 - protein, 10 aa, Homo sapiens
ALADGVVSQA

SEQ ID NO: 4503 - protein, 10 aa, Homo sapiens
ALADIAQSQL

SEQ ID NO: 4504 - protein, 9 aa, Homo sapiens
ALADVATVL

SEQ ID NO: 4505 - protein, 9 aa, Homo sapiens
ALADVMSQL

SEQ ID NO: 4506 - protein, 11 aa, Homo sapiens
ALADVPELARL

SEQ ID NO: 4507 - protein, 9 aa, Homo sapiens
ALAEDPQEL

SEQ ID NO: 4508 - protein, 10 aa, Homo sapiens
ALAEGLDIKL

SEQ ID NO: 4509 - protein, 9 aa, Homo sapiens
ALAEGQLRL

SEQ ID NO: 4510 - protein, 11 aa, Homo sapiens
ALAEIPGVRSV

SEQ ID NO: 4511 - protein, 9 aa, Homo sapiens
ALAEKLDRL

SEQ ID NO: 4512 - protein, 10 aa, Homo sapiens
ALAELIDNSL

SEQ ID NO: 4513 - protein, 9 aa, Homo sapiens
ALAEQVQKA

SEQ ID NO: 4514 - protein, 9 aa, Homo sapiens
ALAERLDIV

SEQ ID NO: 4515 - protein, 11 aa, Homo sapiens
ALAEVAAMENV

SEQ ID NO: 4516 - protein, 9 aa, Homo sapiens
ALAGDQPSV

SEQ ID NO: 4517 - protein, 9 aa, Homo sapiens
ALAGGITMV

SEQ ID NO: 4518 - protein, 9 aa, Homo sapiens
ALAGIVTNV

SEQ ID NO: 4519 - protein, 11 aa, Homo sapiens
ALAGPEVEAHL

SEQ ID NO: 4520 - protein, 9 aa, Homo sapiens
ALAGVNPQL

SEQ ID NO: 4521 - protein, 9 aa, Homo sapiens
ALAKDMALA

SEQ ID NO: 4522 - protein, 10 aa, Homo sapiens
ALAKGEVTEM

SEQ ID NO: 4523 - protein, 10 aa, Homo sapiens
ALAKPPVVSV

SEQ ID NO: 4524 - protein, 8 aa, Homo sapiens
ALALTQTW

SEQ ID NO: 4525 - protein, 9 aa, Homo sapiens
ALAPAPPQV

SEQ ID NO: 4526 - protein, 11 aa, Homo sapiens
ALAPASTQSPA

SEQ ID NO: 4527 - protein, 10 aa, Homo sapiens
ALAPDLAQAP

SEQ ID NO: 4528 - protein, 9 aa, Homo sapiens
ALAPGRGPS

SEQ ID NO: 4529 - protein, 9 aa, Homo sapiens
ALAPHLDDA

SEQ ID NO: 4530 - protein, 9 aa, Homo sapiens
ALAPPPPAA

SEQ ID NO: 4531 - protein, 9 aa, Homo sapiens
ALAPSPAAA

SEQ ID NO: 4532 - protein, 8 aa, Homo sapiens
ALAPSSPL

SEQ ID NO: 4533 - protein, 9 aa, Homo sapiens
ALAPTPSAV

SEQ ID NO: 4534 - protein, 9 aa, Homo sapiens
ALAQADRLI

SEQ ID NO: 4535 - protein, 9 aa, Artificial Sequence
  unknown
ALARSILPA

SEQ ID NO: 4536 - protein, 9 aa, Artificial Sequence
  unknown
ALARTALAL

SEQ ID NO: 4537 - protein, 9 aa, Homo sapiens
ALASHILTA

SEQ ID NO: 4538 - protein, 9 aa, Homo sapiens
ALASISHVA

SEQ ID NO: 4539 - protein, 9 aa, Homo sapiens
ALASVAYQV

SEQ ID NO: 4540 - protein, 9 aa, Homo sapiens
ALASVIKEL

SEQ ID NO: 4541 - protein, 9 aa, Homo sapiens
ALATHILSL

SEQ ID NO: 4542 - protein, 9 aa, Homo sapiens
ALATKLLSL

SEQ ID NO: 4543 - protein, 8 aa, Homo sapiens
ALATLYAL

SEQ ID NO: 4544 - protein, 9 aa, Homo sapiens
ALAVNISAA

SEQ ID NO: 4545 - protein, 10 aa, Homo sapiens
ALCEENMRGV

SEQ ID NO: 4546 - protein, 10 aa, Artificial Sequence
  unknown
ALCTMGIQEL

SEQ ID NO: 4547 - protein, 11 aa, Homo sapiens
ALDEAGQRSTM

SEQ ID NO: 4548 - protein, 10 aa, Homo sapiens
ALDEGDIALL

SEQ ID NO: 4549 - protein, 9 aa, Toxoplasma gondii ME49
ALDEPTTNL

SEQ ID NO: 4550 - protein, 9 aa, Homo sapiens
ALDHMVEYV

SEQ ID NO: 4551 - protein, 9 aa, Homo sapiens
ALDIMIPMV

SEQ ID NO: 4552 - protein, 11 aa, Homo sapiens
ALDSGASLLHL

SEQ ID NO: 4553 - protein, 9 aa, Homo sapiens
ALEARVAQL

SEQ ID NO: 4554 - protein, 9 aa, Homo sapiens
ALEDRVWEL

SEQ ID NO: 4555 - protein, 9 aa, Homo sapiens
ALEHRVYEV

SEQ ID NO: 4556 - protein, 9 aa, Homo sapiens
ALEKKQGQL

SEQ ID NO: 4557 - protein, 9 aa, Homo sapiens
ALEPIDITV

SEQ ID NO: 4558 - protein, 9 aa, Homo sapiens
ALFDAQAQV

SEQ ID NO: 4559 - protein, 11 aa, Homo sapiens
ALFEAAREVTL

SEQ ID NO: 4560 - protein, 11 aa, Homo sapiens
ALFEESGLIRI

SEQ ID NO: 4561 - protein, 10 aa, Homo sapiens
ALFEGVVRQI

SEQ ID NO: 4562 - protein, 9 aa, Homo sapiens
ALFISPALI

SEQ ID NO: 4563 - protein, 9 aa, Homo sapiens
ALFKDAWLL

SEQ ID NO: 4564 - protein, 9 aa, Homo sapiens
ALFPERITV

SEQ ID NO: 4565 - protein, 11 aa, Homo sapiens
ALFPVAEDISL

SEQ ID NO: 4566 - protein, 9 aa, Homo sapiens
ALGAPPPPA

SEQ ID NO: 4567 - protein, 10 aa, Homo sapiens
ALGDKFLLRV

SEQ ID NO: 4568 - protein, 9 aa, Homo sapiens
ALGDQILFV

SEQ ID NO: 4569 - protein, 11 aa, Homo sapiens
ALGEEALLRYV

SEQ ID NO: 4570 - protein, 11 aa, Homo sapiens
ALGFYPAEITL

SEQ ID NO: 4571 - protein, 9 aa, Homo sapiens
ALGGAPYQV

SEQ ID NO: 4572 - protein, 9 aa, Homo sapiens
ALGHVIVLL

SEQ ID NO: 4573 - protein, 9 aa, Homo sapiens
ALGPVPPEA

SEQ ID NO: 4574 - protein, 9 aa, Homo sapiens
ALGPVWAAL

SEQ ID NO: 4575 - protein, 9 aa, Homo sapiens
ALGQMPISP

SEQ ID NO: 4576 - protein, 9 aa, Homo sapiens
ALGSFIYHL

SEQ ID NO: 4577 - protein, 9 aa, Homo sapiens
ALGVDLKEV

SEQ ID NO: 4578 - protein, 9 aa, Homo sapiens
ALHAAVIAI

SEQ ID NO: 4579 - protein, 9 aa, Homo sapiens
ALHARMETV

SEQ ID NO: 4580 - protein, 9 aa, Homo sapiens
ALHHAVIFL

SEQ ID NO: 4581 - protein, 9 aa, Homo sapiens
ALHLRSWLL

SEQ ID NO: 4582 - protein, 9 aa, Homo sapiens
ALHQILVLL

SEQ ID NO: 4583 - protein, 9 aa, Homo sapiens
ALHWFLNQV

SEQ ID NO: 4584 - protein, 10 aa, Homo sapiens
ALIENLTHQI

SEQ ID NO: 4585 - protein, 10 aa, Homo sapiens
ALIEQKLNEA

SEQ ID NO: 4586 - protein, 9 aa, Homo sapiens
ALIEQKVEL

SEQ ID NO: 4587 - protein, 11 aa, Homo sapiens
ALIEVPDGFTA

SEQ ID NO: 4588 - protein, 9 aa, Homo sapiens
ALIGMSPQV

SEQ ID NO: 4589 - protein, 11 aa, Homo sapiens
ALILEPSLYTV

SEQ ID NO: 4590 - protein, 9 aa, Homo sapiens
ALINKLDFA

SEQ ID NO: 4591 - protein, 9 aa, Homo sapiens
ALINNIVEI

SEQ ID NO: 4592 - protein, 11 aa, Homo sapiens
ALINNIVEIRV

SEQ ID NO: 4593 - protein, 9 aa, Homo sapiens
ALINTQALL

SEQ ID NO: 4594 - protein, 11 aa, Homo sapiens
ALIPETTTLTV

SEQ ID NO: 4595 - protein, 9 aa, Homo sapiens
ALIQQATTV

SEQ ID NO: 4596 - protein, 10 aa, Homo sapiens
ALIRLDDLFL

SEQ ID NO: 4597 - protein, 10 aa, Homo sapiens
ALISEKLETL

SEQ ID NO: 4598 - protein, 10 aa, Homo sapiens
ALISRGLEWV

SEQ ID NO: 4599 - protein, 8 aa, Homo sapiens
ALITAALY

SEQ ID NO: 4600 - protein, 11 aa, Homo sapiens
ALITDPDEMRM

SEQ ID NO: 4601 - protein, 9 aa, Homo sapiens
ALITEVVRL

SEQ ID NO: 4602 - protein, 9 aa, Homo sapiens
ALITTILHL

SEQ ID NO: 4603 - protein, 9 aa, Homo sapiens
ALKPDLVNV

SEQ ID NO: 4604 - protein, 9 aa, Homo sapiens
ALLAYTLGV

SEQ ID NO: 4605 - protein, 9 aa, Homo sapiens
ALLDGRLQV

SEQ ID NO: 4606 - protein, 9 aa, Homo sapiens
ALLDGRVQL

SEQ ID NO: 4607 - protein, 10 aa, Homo sapiens
ALLDGTVFEI

SEQ ID NO: 4608 - protein, 11 aa, Homo sapiens
ALLDKDLQIEV

SEQ ID NO: 4609 - protein, 10 aa, Homo sapiens
ALLDQALSNA

SEQ ID NO: 4610 - protein, 10 aa, Homo sapiens
ALLDQLHTLL

SEQ ID NO: 4611 - protein, 9 aa, Homo sapiens
ALLDQTKTL

SEQ ID NO: 4612 - protein, 11 aa, Homo sapiens
ALLEADVNIKL

SEQ ID NO: 4613 - protein, 11 aa, Homo sapiens
ALLEDSVIRQA

SEQ ID NO: 4614 - protein, 11 aa, Homo sapiens
ALLEENSTPQL

SEQ ID NO: 4615 - protein, 9 aa, Homo sapiens
ALLEEVKAL

SEQ ID NO: 4616 - protein, 10 aa, Homo sapiens
ALLEEVKALL

SEQ ID NO: 4617 - protein, 9 aa, Homo sapiens
ALLEKLTEL

SEQ ID NO: 4618 - protein, 11 aa, Homo sapiens
ALLEKPGELSL

SEQ ID NO: 4619 - protein, 9 aa, Homo sapiens
ALLELLHEL

SEQ ID NO: 4620 - protein, 10 aa, Homo sapiens
ALLELVPWRA

SEQ ID NO: 4621 - protein, 11 aa, Homo sapiens
ALLENGIIHHV

SEQ ID NO: 4622 - protein, 11 aa, Homo sapiens
ALLEPEFILKA

SEQ ID NO: 4623 - protein, 11 aa, Homo sapiens
ALLEPGGVLTI

SEQ ID NO: 4624 - protein, 11 aa, Homo sapiens
ALLEQTGDMSL

SEQ ID NO: 4625 - protein, 10 aa, Homo sapiens
ALLESVLRHV

SEQ ID NO: 4626 - protein, 9 aa, Homo sapiens
ALLGELARL

SEQ ID NO: 4627 - protein, 9 aa, Homo sapiens
ALLGHNVGD

SEQ ID NO: 4628 - protein, 9 aa, Homo sapiens
ALLGKLDAI

SEQ ID NO: 4629 - protein, 11 aa, Homo sapiens
ALLGKLDAINV

SEQ ID NO: 4630 - protein, 9 aa, Homo sapiens
ALLGRLAEL

SEQ ID NO: 4631 - protein, 9 aa, Homo sapiens
ALLHKTIQL

SEQ ID NO: 4632 - protein, 9 aa, Homo sapiens
ALLHTVTSI

SEQ ID NO: 4633 - protein, 10 aa, Homo sapiens
ALLKDSIVQL

SEQ ID NO: 4634 - protein, 9 aa, Homo sapiens
ALLKHLEGI

SEQ ID NO: 4635 - protein, 9 aa, Homo sapiens
ALLKQIQEA

SEQ ID NO: 4636 - protein, 9 aa, Homo sapiens
ALLKVNQEL

SEQ ID NO: 4637 - protein, 9 aa, Homo sapiens
ALLKYIETL

SEQ ID NO: 4638 - protein, 10 aa, Homo sapiens
ALLLPPVTLA

SEQ ID NO: 4639 - protein, 10 aa, Homo sapiens
ALLMLGGGLL

SEQ ID NO: 4640 - protein, 10 aa, Homo sapiens
ALLNAILHSA

SEQ ID NO: 4641 - protein, 9 aa, Homo sapiens
ALLNEAKEV

SEQ ID NO: 4642 - protein, 9 aa, Homo sapiens
ALLNTINYL

SEQ ID NO: 4643 - protein, 11 aa, Homo sapiens
ALLPASGQIAL

SEQ ID NO: 4644 - protein, 11 aa, Homo sapiens
ALLPEPNHVML

SEQ ID NO: 4645 - protein, 10 aa, Homo sapiens
ALLPGSPVEA

SEQ ID NO: 4646 - protein, 9 aa, Homo sapiens
ALLPHLYTL

SEQ ID NO: 4647 - protein, 11 aa, Homo sapiens
ALLPVASRLLL

SEQ ID NO: 4648 - protein, 9 aa, Homo sapiens
ALLQDLHKA

SEQ ID NO: 4649 - protein, 9 aa, Homo sapiens
ALLQEIVNI

SEQ ID NO: 4650 - protein, 9 aa, Homo sapiens
ALLQEVYKL

SEQ ID NO: 4651 - protein, 10 aa, Homo sapiens
ALLQGAIESV

SEQ ID NO: 4652 - protein, 9 aa, Homo sapiens
ALLQKLQQL

SEQ ID NO: 4653 - protein, 11 aa, Homo sapiens
ALLQQMEELKL

SEQ ID NO: 4654 - protein, 9 aa, Homo sapiens
ALLQRLEAL

SEQ ID NO: 4655 - protein, 10 aa, Homo sapiens
ALLRDGIELV

SEQ ID NO: 4656 - protein, 9 aa, Homo sapiens
ALLRVTPFI

SEQ ID NO: 4657 - protein, 9 aa, Homo sapiens
ALLSALQAL

SEQ ID NO: 4658 - protein, 9 aa, Homo sapiens
ALLSAVTRL

SEQ ID NO: 4659 - protein, 9 aa, Homo sapiens
ALLSHAPRL

SEQ ID NO: 4660 - protein, 9 aa, Homo sapiens
ALLSIIATV

SEQ ID NO: 4661 - protein, 10 aa, Homo sapiens
ALLSLDPAAV

SEQ ID NO: 4662 - protein, 9 aa, Homo sapiens
ALLSQTSPL

SEQ ID NO: 4663 - protein, 9 aa, Homo sapiens
ALLSSLARC

SEQ ID NO: 4664 - protein, 9 aa, Homo sapiens
ALLTRVQEI

SEQ ID NO: 4665 - protein, 11 aa, Homo sapiens
ALLTTIEEMHL

SEQ ID NO: 4666 - protein, 9 aa, Homo sapiens
ALLTYLEQV

SEQ ID NO: 4667 - protein, 9 aa, Homo sapiens
ALLVRLQEV

SEQ ID NO: 4668 - protein, 9 aa, Homo sapiens
ALMAQEQKL

SEQ ID NO: 4669 - protein, 9 aa, Homo sapiens
ALMDHGVKV

SEQ ID NO: 4670 - protein, 10 aa, Homo sapiens
ALMDSNLPRL

SEQ ID NO: 4671 - protein, 9 aa, Homo sapiens
ALMDSSSSL

SEQ ID NO: 4672 - protein, 9 aa, Homo sapiens
ALMEALVLI

SEQ ID NO: 4673 - protein, 9 aa, Homo sapiens
ALMEAVSHV

SEQ ID NO: 4674 - protein, 10 aa, Homo sapiens
ALMEDAEIRL

SEQ ID NO: 4675 - protein, 9 aa, Homo sapiens
ALMEEILKL

SEQ ID NO: 4676 - protein, 10 aa, Homo sapiens
ALMEGQMAQL

SEQ ID NO: 4677 - protein, 11 aa, Homo sapiens
ALMEQIAHQAV

SEQ ID NO: 4678 - protein, 9 aa, Homo sapiens
ALMERMQQL

SEQ ID NO: 4679 - protein, 9 aa, Homo sapiens
ALMERNSEL

SEQ ID NO: 4680 - protein, 11 aa, Homo sapiens
ALMERTGYSMV

SEQ ID NO: 4681 - protein, 10 aa, Homo sapiens
ALMEVKMKEM

SEQ ID NO: 4682 - protein, 9 aa, Homo sapiens
ALMGSPQLV

SEQ ID NO: 4683 - protein, 9 aa, Homo sapiens
ALMHALTDL

SEQ ID NO: 4684 - protein, 9 aa, Homo sapiens
ALMKEIPAL

SEQ ID NO: 4685 - protein, 9 aa, Homo sapiens
ALMPKQATV

SEQ ID NO: 4686 - protein, 9 aa, Homo sapiens
ALMPQLVQL

SEQ ID NO: 4687 - protein, 9 aa, Homo sapiens
ALMPVTPQA

SEQ ID NO: 4688 - protein, 9 aa, Homo sapiens
ALMPWRYAL

SEQ ID NO: 4689 - protein, 9 aa, Homo sapiens
ALMSKLDGI

SEQ ID NO: 4690 - protein, 11 aa, Homo sapiens
ALMYESEKVGV

SEQ ID NO: 4691 - protein, 9 aa, Homo sapiens
ALMYHTITL

SEQ ID NO: 4692 - protein, 9 aa, Homo sapiens
ALNENINQV

SEQ ID NO: 4693 - protein, 9 aa, Homo sapiens
ALNLYMHQV

SEQ ID NO: 4694 - protein, 9 aa, Homo sapiens
ALNQETTYV

SEQ ID NO: 4695 - protein, 9 aa, Homo sapiens
ALNQYYVHL

SEQ ID NO: 4696 - protein, 10 aa, Homo sapiens
ALPDQGIAKA

SEQ ID NO: 4697 - protein, 9 aa, Homo sapiens
ALPEPSPAA

SEQ ID NO: 4698 - protein, 11 aa, Homo sapiens
ALPETTFPALA

SEQ ID NO: 4699 - protein, 10 aa, Homo sapiens
ALPKEDPTAV

SEQ ID NO: 4700 - protein, 8 aa, Homo sapiens
ALPSLPPL

SEQ ID NO: 4701 - protein, 9 aa, Homo sapiens
ALQAEIHRL

SEQ ID NO: 4702 - protein, 9 aa, Homo sapiens
ALQEALENA

SEQ ID NO: 4703 - protein, 10 aa, Homo sapiens
ALQEASEAYL

SEQ ID NO: 4704 - protein, 11 aa, Homo sapiens
ALQEASEAYLV

SEQ ID NO: 4705 - protein, 9 aa, Homo sapiens
ALQEENVKL

SEQ ID NO: 4706 - protein, 9 aa, Homo sapiens
ALQEEQARL

SEQ ID NO: 4707 - protein, 9 aa, Homo sapiens
ALQEKLEEC

SEQ ID NO: 4708 - protein, 9 aa, Homo sapiens
ALQEKLQYL

SEQ ID NO: 4709 - protein, 9 aa, Homo sapiens
ALQERLDGL

SEQ ID NO: 4710 - protein, 9 aa, Homo sapiens
ALQERLDNV

SEQ ID NO: 4711 - protein, 9 aa, Homo sapiens
ALQESLVQI

SEQ ID NO: 4712 - protein, 9 aa, Homo sapiens
ALQETPPQV

SEQ ID NO: 4713 - protein, 9 aa, Homo sapiens
ALQETPTSV

SEQ ID NO: 4714 - protein, 8 aa, Homo sapiens
ALQGLVTE

SEQ ID NO: 4715 - protein, 8 aa, Homo sapiens
ALQLVVLL

SEQ ID NO: 4716 - protein, 9 aa, Homo sapiens
ALQNLEQLL

SEQ ID NO: 4717 - protein, 9 aa, Homo sapiens
ALQPEPIKV

SEQ ID NO: 4718 - protein, 8 aa, Homo sapiens
ALQPPPAP

SEQ ID NO: 4719 - protein, 9 aa, Homo sapiens
ALQQQLQAV

SEQ ID NO: 4720 - protein, 11 aa, Homo sapiens
ALQSGNSQESV

SEQ ID NO: 4721 - protein, 8 aa, Homo sapiens
ALQSQLSI

SEQ ID NO: 4722 - protein, 9 aa, Homo sapiens
ALQTDPAAV

SEQ ID NO: 4723 - protein, 9 aa, Homo sapiens
ALQWVVVEV

SEQ ID NO: 4724 - protein, 10 aa, Homo sapiens
ALRASRAPML

SEQ ID NO: 4725 - protein, 9 aa, Homo sapiens
ALREASELL

SEQ ID NO: 4726 - protein, 9 aa, Homo sapiens
ALRETVVEV

SEQ ID NO: 4727 - protein, 9 aa, Homo sapiens
ALRQQLEEV

SEQ ID NO: 4728 - protein, 10 aa, Artificial Sequence
  unknown
ALSALAVNEI

SEQ ID NO: 4729 - protein, 9 aa, Homo sapiens
ALSALTARL

SEQ ID NO: 4730 - protein, 9 aa, Homo sapiens
ALSASLARV

SEQ ID NO: 4731 - protein, 9 aa, Homo sapiens
ALSDGVHKI

SEQ ID NO: 4732 - protein, 10 aa, Homo sapiens
ALSDLALHFL

SEQ ID NO: 4733 - protein, 9 aa, Homo sapiens
ALSEKIVSV

SEQ ID NO: 4734 - protein, 9 aa, Homo sapiens
ALSELATAV

SEQ ID NO: 4735 - protein, 9 aa, Homo sapiens
ALSELIILT

SEQ ID NO: 4736 - protein, 9 aa, Homo sapiens
ALSELLQQV

SEQ ID NO: 4737 - protein, 9 aa, Homo sapiens
ALSEMVEYI

SEQ ID NO: 4738 - protein, 9 aa, Homo sapiens
ALSERAVAV

SEQ ID NO: 4739 - protein, 9 aa, Homo sapiens
ALSGHVSTV

SEQ ID NO: 4740 - protein, 9 aa, Homo sapiens
ALSGLAVRL

SEQ ID NO: 4741 - protein, 9 aa, Homo sapiens
ALSIQNYHL

SEQ ID NO: 4742 - protein, 9 aa, Homo sapiens
ALSNHLNAV

SEQ ID NO: 4743 - protein, 9 aa, Homo sapiens
ALSPINIQL

SEQ ID NO: 4744 - protein, 9 aa, Homo sapiens
ALSPTVFAL

SEQ ID NO: 4745 - protein, 9 aa, Homo sapiens
ALSPVIPLI

SEQ ID NO: 4746 - protein, 9 aa, Homo sapiens
ALSPVPSHW

SEQ ID NO: 4747 - protein, 9 aa, Homo sapiens
ALSQFHAAV

SEQ ID NO: 4748 - protein, 9 aa, Homo sapiens
ALSRVSVNV

SEQ ID NO: 4749 - protein, 9 aa, Homo sapiens
ALTAVSSQL

SEQ ID NO: 4750 - protein, 9 aa, Homo sapiens
ALTGYLHTI

SEQ ID NO: 4751 - protein, 9 aa, Homo sapiens
ALTRALALA

SEQ ID NO: 4752 - protein, 9 aa, Homo sapiens
ALTRELAII

SEQ ID NO: 4753 - protein, 9 aa, Homo sapiens
ALTSLLKTV

SEQ ID NO: 4754 - protein, 9 aa, Homo sapiens
ALVAIFTHL

SEQ ID NO: 4755 - protein, 11 aa, Homo sapiens
ALVAVPLGMTV

SEQ ID NO: 4756 - protein, 9 aa, Homo sapiens
ALVDGYFRL

SEQ ID NO: 4757 - protein, 9 aa, Homo sapiens
ALVEALAAA

SEQ ID NO: 4758 - protein, 9 aa, Homo sapiens
ALVESLITV

SEQ ID NO: 4759 - protein, 9 aa, Homo sapiens
ALVFELHYV

SEQ ID NO: 4760 - protein, 9 aa, Homo sapiens
ALVGVVKEA

SEQ ID NO: 4761 - protein, 9 aa, Homo sapiens
ALVHHSFAL

SEQ ID NO: 4762 - protein, 9 aa, Homo sapiens
ALVLLLTEV

SEQ ID NO: 4763 - protein, 9 aa, Homo sapiens
ALVNAIVLV

SEQ ID NO: 4764 - protein, 9 aa, Homo sapiens
ALVNELYSL

SEQ ID NO: 4765 - protein, 8 aa, Homo sapiens
ALVNIIAV

SEQ ID NO: 4766 - protein, 11 aa, Homo sapiens
ALVPGYNGTSN

SEQ ID NO: 4767 - protein, 9 aa, Artificial Sequence
  unknown
ALVSAALLL

SEQ ID NO: 4768 - protein, 10 aa, Homo sapiens
ALVSGGVAQA

SEQ ID NO: 4769 - protein, 10 aa, Homo sapiens
ALVSLILNNV

SEQ ID NO: 4770 - protein, 9 aa, Homo sapiens
ALVSYLIRL

SEQ ID NO: 4771 - protein, 9 aa, Homo sapiens
ALWEKWLSL

SEQ ID NO: 4772 - protein, 11 aa, Homo sapiens
ALWENPESGEL

SEQ ID NO: 4773 - protein, 9 aa, Homo sapiens
ALWETEVYI

SEQ ID NO: 4774 - protein, 9 aa, Homo sapiens
ALWFRADEL

SEQ ID NO: 4775 - protein, 9 aa, Homo sapiens
ALWGHLKEL

SEQ ID NO: 4776 - protein, 9 aa, Homo sapiens
ALWKGVQSL

SEQ ID NO: 4777 - protein, 9 aa, Homo sapiens
ALWKQLLEL

SEQ ID NO: 4778 - protein, 9 aa, Homo sapiens
ALWLHVNQL

SEQ ID NO: 4779 - protein, 9 aa, Homo sapiens
ALWREVASL

SEQ ID NO: 4780 - protein, 9 aa, Homo sapiens
ALWTEKLQV

SEQ ID NO: 4781 - protein, 9 aa, Homo sapiens
ALWTGMHTI

SEQ ID NO: 4782 - protein, 9 aa, Homo sapiens
ALYDNVPEC

SEQ ID NO: 4783 - protein, 10 aa, Homo sapiens
ALYDVRTILL

SEQ ID NO: 4784 - protein, 9 aa, Homo sapiens
ALYEGYATV

SEQ ID NO: 4785 - protein, 10 aa, Homo sapiens
ALYEKDNTYL

SEQ ID NO: 4786 - protein, 10 aa, Homo sapiens
ALYERKLLSL

SEQ ID NO: 4787 - protein, 9 aa, Homo sapiens
ALYHEQLAL

SEQ ID NO: 4788 - protein, 11 aa, Homo sapiens
ALYLGAKAIQL

SEQ ID NO: 4789 - protein, 9 aa, Homo sapiens
ALYLYDVEV

SEQ ID NO: 4790 - protein, 11 aa, Homo sapiens
ALYNVDAGHRA

SEQ ID NO: 4791 - protein, 10 aa, Homo sapiens
ALYPGQLVQL

SEQ ID NO: 4792 - protein, 10 aa, Homo sapiens
ALYPHLPPEA

SEQ ID NO: 4793 - protein, 9 aa, Homo sapiens
ALYQFSNLL

SEQ ID NO: 4794 - protein, 9 aa, Homo sapiens
ALYQSLPTL

SEQ ID NO: 4795 - protein, 9 aa, Homo sapiens
ALYTGDPNL

SEQ ID NO: 4796 - protein, 9 aa, Homo sapiens
ALYTVIETV

SEQ ID NO: 4797 - protein, 9 aa, Homo sapiens
ALYVAVVNV

SEQ ID NO: 4798 - protein, 9 aa, Homo sapiens
AMAARPHSI

SEQ ID NO: 4799 - protein, 10 aa, Homo sapiens
AMAHVAGFTV

SEQ ID NO: 4800 - protein, 10 aa, Homo sapiens
AMAQVIGDRV

SEQ ID NO: 4801 - protein, 10 aa, Homo sapiens
AMELCLALLL

SEQ ID NO: 4802 - protein, 9 aa, Homo sapiens
AMFENFVSV

SEQ ID NO: 4803 - protein, 9 aa, Homo sapiens
AMGIAPPKV

SEQ ID NO: 4804 - protein, 9 aa, Homo sapiens
AMIDQVLEL

SEQ ID NO: 4805 - protein, 10 aa, Homo sapiens
AMIEGEIESL

SEQ ID NO: 4806 - protein, 9 aa, Homo sapiens
AMIELVERL

SEQ ID NO: 4807 - protein, 9 aa, Homo sapiens
AMLEKNYKL

SEQ ID NO: 4808 - protein, 9 aa, Homo sapiens
AMLNEPWAV

SEQ ID NO: 4809 - protein, 9 aa, Homo sapiens
AMNDILAQV

SEQ ID NO: 4810 - protein, 9 aa, Homo sapiens
AMQEFLTRL

SEQ ID NO: 4811 - protein, 11 aa, Homo sapiens
AMSNLVPPVEL

SEQ ID NO: 4812 - protein, 9 aa, Toxoplasma gondii GT1
AMTKDNNLL

SEQ ID NO: 4813 - protein, 9 aa, Homo sapiens
AQFGYYFRV

SEQ ID NO: 4814 - protein, 9 aa, Homo sapiens
AQIGADIAL

SEQ ID NO: 4815 - protein, 9 aa, Homo sapiens
AQIGSYVHV

SEQ ID NO: 4816 - protein, 9 aa, Homo sapiens
AQIRYLTQV

SEQ ID NO: 4817 - protein, 9 aa, Homo sapiens
AQLEAEVKL

SEQ ID NO: 4818 - protein, 9 aa, Homo sapiens
AQLISLDQV

SEQ ID NO: 4819 - protein, 9 aa, Homo sapiens
AQNPSLLAL

SEQ ID NO: 4820 - protein, 11 aa, Homo sapiens
ATIEALDAGAV

SEQ ID NO: 4821 - protein, 11 aa, Homo sapiens
AVGPASILKEV

SEQ ID NO: 4822 - protein, 10 aa, Homo sapiens
AVLQGKLAEV

SEQ ID NO: 4823 - protein, 9 aa, Homo sapiens
AVMESIQGV

SEQ ID NO: 4824 - protein, 11 aa, Homo sapiens
AVQAAAAQAAV

SEQ ID NO: 4825 - protein, 9 aa, Homo sapiens
AVWAAVQAV

SEQ ID NO: 4826 - protein, 9 aa, Homo sapiens
CLADELINA

SEQ ID NO: 4827 - protein, 10 aa, Homo sapiens
CLCMAEAILL

SEQ ID NO: 4828 - protein, 10 aa, Homo sapiens
DFDGDEIFHV

SEQ ID NO: 4829 - protein, 9 aa, Homo sapiens
DIETGQQTV

SEQ ID NO: 4830 - protein, 8 aa, Homo sapiens
DLAGLKEL

SEQ ID NO: 4831 - protein, 9 aa, Homo sapiens
DLATLILNM

SEQ ID NO: 4832 - protein, 8 aa, Homo sapiens
DLEHKVLL

SEQ ID NO: 4833 - protein, 8 aa, Homo sapiens
DLEKTRQY

SEQ ID NO: 4834 - protein, 10 aa, Homo sapiens
DLENENMMRV

SEQ ID NO: 4835 - protein, 9 aa, Homo sapiens
DLETERILL

SEQ ID NO: 4836 - protein, 8 aa, Homo sapiens
DLGSKDLK

SEQ ID NO: 4837 - protein, 9 aa, Homo sapiens
DLIHEIYTV

SEQ ID NO: 4838 - protein, 8 aa, Homo sapiens
DLKPTLTI

SEQ ID NO: 4839 - protein, 8 aa, Homo sapiens
DLLLRLEP

SEQ ID NO: 4840 - protein, 10 aa, Homo sapiens
DLMTLHPIEI

SEQ ID NO: 4841 - protein, 10 aa, Homo sapiens
DLNWLVKNSY

SEQ ID NO: 4842 - protein, 8 aa, Homo sapiens
DLPLGVKL

SEQ ID NO: 4843 - protein, 11 aa, Homo sapiens
DLQATALDLEW

SEQ ID NO: 4844 - protein, 8 aa, Homo sapiens
DLRLLSSL

SEQ ID NO: 4845 - protein, 11 aa, Homo sapiens
DLSDNTGKMEV

SEQ ID NO: 4846 - protein, 9 aa, Homo sapiens
DLSPEVPSN

SEQ ID NO: 4847 - protein, 9 aa, Homo sapiens
DLTLAGRVI

SEQ ID NO: 4848 - protein, 10 aa, Homo sapiens
DLTLAGRVIV

SEQ ID NO: 4849 - protein, 9 aa, Homo sapiens
DLVLQTLPL

SEQ ID NO: 4850 - protein, 9 aa, Homo sapiens
ELAEELLRI

SEQ ID NO: 4851 - protein, 9 aa, Homo sapiens
ELAKELPQV

SEQ ID NO: 4852 - protein, 11 aa, Homo sapiens
ELANKVGAAEI

SEQ ID NO: 4853 - protein, 8 aa, Homo sapiens
ELANLEKW

SEQ ID NO: 4854 - protein, 9 aa, Homo sapiens
ELAQLESIL

SEQ ID NO: 4855 - protein, 9 aa, Homo sapiens
ELDPEHQRA

SEQ ID NO: 4856 - protein, 9 aa, Homo sapiens
ELEARLDAA

SEQ ID NO: 4857 - protein, 10 aa, Homo sapiens
ELEEIARRVQ

SEQ ID NO: 4858 - protein, 9 aa, Homo sapiens
ELERESEFW

SEQ ID NO: 4859 - protein, 9 aa, Homo sapiens
ELETLLAKL

SEQ ID NO: 4860 - protein, 11 aa, Homo sapiens
ELFPTPALLQV

SEQ ID NO: 4861 - protein, 9 aa, Homo sapiens
ELFSSPPAV

SEQ ID NO: 4862 - protein, 10 aa, Homo sapiens
ELGLGRVVEN

SEQ ID NO: 4863 - protein, 9 aa, Homo sapiens
ELISKAIEI

SEQ ID NO: 4864 - protein, 9 aa, Homo sapiens
ELIVCSHEI

SEQ ID NO: 4865 - protein, 9 aa, Homo sapiens
ELKDLLKKN

SEQ ID NO: 4866 - protein, 8 aa, Homo sapiens
ELKIEEYV

SEQ ID NO: 4867 - protein, 10 aa, Homo sapiens
ELKKENQQII

SEQ ID NO: 4868 - protein, 8 aa, Homo sapiens
ELKKINQN

SEQ ID NO: 4869 - protein, 9 aa, Homo sapiens
ELKLQLQEL

SEQ ID NO: 4870 - protein, 10 aa, Homo sapiens
ELLGAGIEKV

SEQ ID NO: 4871 - protein, 9 aa, Homo sapiens
ELLKILQEL

SEQ ID NO: 4872 - protein, 9 aa, Homo sapiens
ELLLLQPEL

SEQ ID NO: 4873 - protein, 9 aa, Homo sapiens
ELMEQVPHI

SEQ ID NO: 4874 - protein, 10 aa, Homo sapiens
ELMMVIAQEN

SEQ ID NO: 4875 - protein, 9 aa, Homo sapiens
ELNILSLDI

SEQ ID NO: 4876 - protein, 9 aa, Homo sapiens
ELNISSLQI

SEQ ID NO: 4877 - protein, 9 aa, Homo sapiens
ELNLRSNEL

SEQ ID NO: 4878 - protein, 11 aa, Homo sapiens
ELQALYALQAL

SEQ ID NO: 4879 - protein, 9 aa, Homo sapiens
ELQAVLSYI

SEQ ID NO: 4880 - protein, 11 aa, Homo sapiens
ELQDCALPLLK

SEQ ID NO: 4881 - protein, 9 aa, Homo sapiens
ELQKKIQEL

SEQ ID NO: 4882 - protein, 8 aa, Homo sapiens
ELQLLEKV

SEQ ID NO: 4883 - protein, 11 aa, Homo sapiens
ELRKGDQILSV

SEQ ID NO: 4884 - protein, 9 aa, Homo sapiens
ELSYHNLEL

SEQ ID NO: 4885 - protein, 9 aa, Homo sapiens
ELTDKLLIF

SEQ ID NO: 4886 - protein, 10 aa, Homo sapiens
ELTLELADIL

SEQ ID NO: 4887 - protein, 10 aa, Homo sapiens
ELVGGNQVKN

SEQ ID NO: 4888 - protein, 10 aa, Homo sapiens
ELVLSGTRAL

SEQ ID NO: 4889 - protein, 9 aa, Homo sapiens
ELVVSIVLL

SEQ ID NO: 4890 - protein, 9 aa, Homo sapiens
ELYLDCIQV

SEQ ID NO: 4891 - protein, 9 aa, Homo sapiens
FAAPMDITL

SEQ ID NO: 4892 - protein, 9 aa, Homo sapiens
FAIPLIEKL

SEQ ID NO: 4893 - protein, 9 aa, Homo sapiens
FIDDANYSV

SEQ ID NO: 4894 - protein, 9 aa, Homo sapiens
FIDEYVETV

SEQ ID NO: 4895 - protein, 9 aa, Homo sapiens
FIFEKILQL

SEQ ID NO: 4896 - protein, 9 aa, Homo sapiens
FILEKIEYL

SEQ ID NO: 4897 - protein, 9 aa, Homo sapiens
FILPHISTA

SEQ ID NO: 4898 - protein, 9 aa, Homo sapiens
FILPYIHKA

SEQ ID NO: 4899 - protein, 9 aa, Homo sapiens
FINSRIITV

SEQ ID NO: 4900 - protein, 9 aa, Homo sapiens
FIREHIEEL

SEQ ID NO: 4901 - protein, 9 aa, Homo sapiens
FIWDFIEKV

SEQ ID NO: 4902 - protein, 11 aa, Homo sapiens
FLAAFTLPALL

SEQ ID NO: 4903 - protein, 9 aa, Homo sapiens
FLADDLGGL

SEQ ID NO: 4904 - protein, 11 aa, Homo sapiens
FLADPVSNMAM

SEQ ID NO: 4905 - protein, 10 aa, Homo sapiens
FLAEEKHLHV

SEQ ID NO: 4906 - protein, 11 aa, Homo sapiens
FLAEEKHLHVL

SEQ ID NO: 4907 - protein, 9 aa, Homo sapiens
FLAENDWEM

SEQ ID NO: 4908 - protein, 10 aa, Homo sapiens
FLAERLYAEV

SEQ ID NO: 4909 - protein, 9 aa, Homo sapiens
FLAFILHRL

SEQ ID NO: 4910 - protein, 9 aa, Homo sapiens
FLAGEGMTV

SEQ ID NO: 4911 - protein, 9 aa, Homo sapiens
FLAHIYTEL

SEQ ID NO: 4912 - protein, 9 aa, Homo sapiens
FLAKDFNFL

SEQ ID NO: 4913 - protein, 11 aa, Homo sapiens
FLAKDFNFLTL

SEQ ID NO: 4914 - protein, 9 aa, Homo sapiens
FLANLHITA

SEQ ID NO: 4915 - protein, 10 aa, Homo sapiens
FLAPASKMII

SEQ ID NO: 4916 - protein, 9 aa, Homo sapiens
FLAQRAVEL

SEQ ID NO: 4917 - protein, 10 aa, Homo sapiens
FLASVVDPRV

SEQ ID NO: 4918 - protein, 9 aa, Homo sapiens
FLDEEVKLI

SEQ ID NO: 4919 - protein, 10 aa, Homo sapiens
FLDEKTHELL

SEQ ID NO: 4920 - protein, 11 aa, Homo sapiens
FLDEQAEKHNI

SEQ ID NO: 4921 - protein, 8 aa, Homo sapiens
FLDESRST

SEQ ID NO: 4922 - protein, 9 aa, Homo sapiens
FLDEYIFLA

SEQ ID NO: 4923 - protein, 10 aa, Homo sapiens
FLDFIGHILT

SEQ ID NO: 4924 - protein, 10 aa, Homo sapiens
FLDGNELTLA

SEQ ID NO: 4925 - protein, 9 aa, Homo sapiens
FLDIILKTV

SEQ ID NO: 4926 - protein, 9 aa, Homo sapiens
FLDKELKEC

SEQ ID NO: 4927 - protein, 9 aa, Homo sapiens
FLDKFKQVF

SEQ ID NO: 4928 - protein, 9 aa, Homo sapiens
FLDKILVKL

SEQ ID NO: 4929 - protein, 9 aa, Homo sapiens
FLDMTNWNL

SEQ ID NO: 4930 - protein, 9 aa, Homo sapiens
FLDNAIMIV

SEQ ID NO: 4931 - protein, 9 aa, Homo sapiens
FLDNGPKTI

SEQ ID NO: 4932 - protein, 9 aa, Homo sapiens
FLDNSFEKV

SEQ ID NO: 4933 - protein, 9 aa, Homo sapiens
FLDNSLDTV

SEQ ID NO: 4934 - protein, 11 aa, Homo sapiens
FLDPHTTQTFV

SEQ ID NO: 4935 - protein, 10 aa, Homo sapiens
FLDPKELMEL

SEQ ID NO: 4936 - protein, 9 aa, Homo sapiens
FLDQVAHKL

SEQ ID NO: 4937 - protein, 9 aa, Homo sapiens
FLDSAYFRL

SEQ ID NO: 4938 - protein, 9 aa, Homo sapiens
FLDSEVSEL

SEQ ID NO: 4939 - protein, 9 aa, Homo sapiens
FLDSKFYLL

SEQ ID NO: 4940 - protein, 9 aa, Homo sapiens
FLDTSNQHL

SEQ ID NO: 4941 - protein, 9 aa, Homo sapiens
FLDVFLPRV

SEQ ID NO: 4942 - protein, 9 aa, Homo sapiens
FLENETWEL

SEQ ID NO: 4943 - protein, 9 aa, Homo sapiens
FLETNVPLL

SEQ ID NO: 4944 - protein, 10 aa, Homo sapiens
FLFASTILHL

SEQ ID NO: 4945 - protein, 9 aa, Homo sapiens
FLFDKTLLI

SEQ ID NO: 4946 - protein, 10 aa, Homo sapiens
FLFDPKKLSV

SEQ ID NO: 4947 - protein, 10 aa, Homo sapiens
FLFDTKPLIV

SEQ ID NO: 4948 - protein, 9 aa, Homo sapiens
FLFELPSRL

SEQ ID NO: 4949 - protein, 10 aa, Homo sapiens
FLFEYDTPRM

SEQ ID NO: 4950 - protein, 10 aa, Homo sapiens
FLFGEEPSKL

SEQ ID NO: 4951 - protein, 11 aa, Homo sapiens
FLFGGLAGMGA

SEQ ID NO: 4952 - protein, 9 aa, Homo sapiens
FLFLDRTYV

SEQ ID NO: 4953 - protein, 11 aa, Homo sapiens
FLFNTENKLLL

SEQ ID NO: 4954 - protein, 9 aa, Homo sapiens
FLFNYDYTL

SEQ ID NO: 4955 - protein, 9 aa, Homo sapiens
FLFPHSVLV

SEQ ID NO: 4956 - protein, 9 aa, Homo sapiens
FLFSKFIEL

SEQ ID NO: 4957 - protein, 8 aa, Homo sapiens
FLGIVAEV

SEQ ID NO: 4958 - protein, 8 aa, Homo sapiens
FLGKIYQI

SEQ ID NO: 4959 - protein, 9 aa, Homo sapiens
FLGTFILKV

SEQ ID NO: 4960 - protein, 11 aa, Homo sapiens
FLGVEMEKVQL

SEQ ID NO: 4961 - protein, 9 aa, Homo sapiens
FLHDNMVEI

SEQ ID NO: 4962 - protein, 11 aa, Homo sapiens
FLHEESILERV

SEQ ID NO: 4963 - protein, 9 aa, Homo sapiens
FLHLKEFYL

SEQ ID NO: 4964 - protein, 10 aa, Homo sapiens
FLHWYTGEGM

SEQ ID NO: 4965 - protein, 9 aa, Homo sapiens
FLIAEKVSL

SEQ ID NO: 4966 - protein, 11 aa, Homo sapiens
FLIAQLPKLQY

SEQ ID NO: 4967 - protein, 9 aa, Homo sapiens
FLIDRVFGI

SEQ ID NO: 4968 - protein, 10 aa, Homo sapiens
FLIEYGPAQL

SEQ ID NO: 4969 - protein, 11 aa, Homo sapiens
FLIILPKELQA

SEQ ID NO: 4970 - protein, 9 aa, Homo sapiens
FLIIPLHSL

SEQ ID NO: 4971 - protein, 11 aa, Homo sapiens
FLILPDAEAQL

SEQ ID NO: 4972 - protein, 11 aa, Homo sapiens
FLILPDMLKNA

SEQ ID NO: 4973 - protein, 10 aa, Homo sapiens
FLINGKPFYF

SEQ ID NO: 4974 - protein, 10 aa, Homo sapiens
FLIPFETRQL

SEQ ID NO: 4975 - protein, 9 aa, Homo sapiens
FLIQNVLRL

SEQ ID NO: 4976 - protein, 9 aa, Homo sapiens
FLISRLIKL

SEQ ID NO: 4977 - protein, 9 aa, Homo sapiens
FLISSHFLL

SEQ ID NO: 4978 - protein, 9 aa, Homo sapiens
FLITILDHL

SEQ ID NO: 4979 - protein, 9 aa, Homo sapiens
FLITSNLEL

SEQ ID NO: 4980 - protein, 9 aa, Homo sapiens
FLKGFLTEV

SEQ ID NO: 4981 - protein, 9 aa, Homo sapiens
FLLDEVDKL

SEQ ID NO: 4982 - protein, 9 aa, Homo sapiens
FLLDFHSHL

SEQ ID NO: 4983 - protein, 9 aa, Homo sapiens
FLLDKPQDL

SEQ ID NO: 4984 - protein, 11 aa, Homo sapiens
FLLDMHWNPSL

SEQ ID NO: 4985 - protein, 10 aa, Homo sapiens
FLLDTADVAL

SEQ ID NO: 4986 - protein, 10 aa, Homo sapiens
FLLEDLSQKL

SEQ ID NO: 4987 - protein, 10 aa, Homo sapiens
FLLEGIRSLV

SEQ ID NO: 4988 - protein, 9 aa, Homo sapiens
FLLEHIRIL

SEQ ID NO: 4989 - protein, 9 aa, Homo sapiens
FLLFINHRL

SEQ ID NO: 4990 - protein, 9 aa, Homo sapiens
FLLGEHLLL

SEQ ID NO: 4991 - protein, 10 aa, Homo sapiens
FLLGFIPAKA

SEQ ID NO: 4992 - protein, 10 aa, Homo sapiens
FLLGSWLEQA

SEQ ID NO: 4993 - protein, 9 aa, Homo sapiens
FLLHVQQQI

SEQ ID NO: 4994 - protein, 9 aa, Homo sapiens
FLLKDLSSL

SEQ ID NO: 4995 - protein, 9 aa, Homo sapiens
FLLKQIEFL

SEQ ID NO: 4996 - protein, 9 aa, Homo sapiens
FLLLQSIKL

SEQ ID NO: 4997 - protein, 11 aa, Homo sapiens
FLLNQADEVKL

SEQ ID NO: 4998 - protein, 10 aa, Homo sapiens
FLLPDGLVRL

SEQ ID NO: 4999 - protein, 9 aa, Homo sapiens
FLLPEVGRG

SEQ ID NO: 5000 - protein, 9 aa, Homo sapiens
FLLPHLKDI

SEQ ID NO: 5001 - protein, 10 aa, Homo sapiens
FLLPLLIEKV

SEQ ID NO: 5002 - protein, 9 aa, Homo sapiens
FLLPMFERL

SEQ ID NO: 5003 - protein, 9 aa, Homo sapiens
FLLPVIMRA

SEQ ID NO: 5004 - protein, 9 aa, Homo sapiens
FLLQLQEEL

SEQ ID NO: 5005 - protein, 9 aa, Homo sapiens
FLLQRVHSL

SEQ ID NO: 5006 - protein, 10 aa, Artificial Sequence
  unknown
FLLSIGMLFL

SEQ ID NO: 5007 - protein, 10 aa, Homo sapiens
FLLSLRGAGA

SEQ ID NO: 5008 - protein, 10 aa, Homo sapiens
FLLTPVPLRS

SEQ ID NO: 5009 - protein, 9 aa, Homo sapiens
FLMEMGFRM

SEQ ID NO: 5010 - protein, 11 aa, Homo sapiens
FLMENGSITSI

SEQ ID NO: 5011 - protein, 9 aa, Homo sapiens
FLMKQQSLL

SEQ ID NO: 5012 - protein, 11 aa, Homo sapiens
FLMRVMDIPYL

SEQ ID NO: 5013 - protein, 9 aa, Homo sapiens
FLMSLLLKN

SEQ ID NO: 5014 - protein, 9 aa, Homo sapiens
FLNDIFERI

SEQ ID NO: 5015 - protein, 9 aa, Homo sapiens
FLNEDLNQL

SEQ ID NO: 5016 - protein, 11 aa, Homo sapiens
FLNEDLNQLIK

SEQ ID NO: 5017 - protein, 9 aa, Homo sapiens
FLNEEVKSL

SEQ ID NO: 5018 - protein, 9 aa, Homo sapiens
FLNEHLQEA

SEQ ID NO: 5019 - protein, 9 aa, Homo sapiens
FLNEIQQSI

SEQ ID NO: 5020 - protein, 9 aa, Homo sapiens
FLNKLVILV

SEQ ID NO: 5021 - protein, 9 aa, Homo sapiens
FLNKNQELL

SEQ ID NO: 5022 - protein, 9 aa, Homo sapiens
FLNLFNHTL

SEQ ID NO: 5023 - protein, 9 aa, Homo sapiens
FLNQFHFGV

SEQ ID NO: 5024 - protein, 9 aa, Homo sapiens
FLNQVLAEI

SEQ ID NO: 5025 - protein, 9 aa, Homo sapiens
FLNSEIHQV

SEQ ID NO: 5026 - protein, 9 aa, Homo sapiens
FLPFLTTEV

SEQ ID NO: 5027 - protein, 9 aa, Homo sapiens
FLPHELPLL

SEQ ID NO: 5028 - protein, 9 aa, Homo sapiens
FLPLLLVLL

SEQ ID NO: 5029 - protein, 10 aa, Homo sapiens
FLQDLKELKV

SEQ ID NO: 5030 - protein, 9 aa, Homo sapiens
FLQDLSLEL

SEQ ID NO: 5031 - protein, 9 aa, Homo sapiens
FLQEATLYL

SEQ ID NO: 5032 - protein, 10 aa, Homo sapiens
FLQEEPGQLL

SEQ ID NO: 5033 - protein, 10 aa, Homo sapiens
FLQEKSPAVA

SEQ ID NO: 5034 - protein, 9 aa, Homo sapiens
FLQEQLVEL

SEQ ID NO: 5035 - protein, 9 aa, Homo sapiens
FLQEWEVYA

SEQ ID NO: 5036 - protein, 9 aa, Homo sapiens
FLQEYVANL

SEQ ID NO: 5037 - protein, 9 aa, Homo sapiens
FLQGQNFFL

SEQ ID NO: 5038 - protein, 11 aa, Homo sapiens
FLQKSIEDMTV

SEQ ID NO: 5039 - protein, 10 aa, Homo sapiens
FLQPGGYHVL

SEQ ID NO: 5040 - protein, 11 aa, Homo sapiens
FLQVTSPEENI

SEQ ID NO: 5041 - protein, 9 aa, Homo sapiens
FLREGSEFL

SEQ ID NO: 5042 - protein, 9 aa, Homo sapiens
FLRNINEYL

SEQ ID NO: 5043 - protein, 9 aa, Homo sapiens
FLSDAIPGL

SEQ ID NO: 5044 - protein, 9 aa, Homo sapiens
FLSELQYYL

SEQ ID NO: 5045 - protein, 9 aa, Homo sapiens
FLSEVFAQL

SEQ ID NO: 5046 - protein, 9 aa, Homo sapiens
FLSFMNTEL

SEQ ID NO: 5047 - protein, 9 aa, Homo sapiens
FLSGAKIWL

SEQ ID NO: 5048 - protein, 10 aa, Homo sapiens
FLSHLSTLEI

SEQ ID NO: 5049 - protein, 9 aa, Homo sapiens
FLSNDTVQL

SEQ ID NO: 5050 - protein, 9 aa, Homo sapiens
FLSNIFQAL

SEQ ID NO: 5051 - protein, 9 aa, Homo sapiens
FLSNVLQEL

SEQ ID NO: 5052 - protein, 9 aa, Homo sapiens
FLSPWPPAV

SEQ ID NO: 5053 - protein, 9 aa, Homo sapiens
FLSQSIHLL

SEQ ID NO: 5054 - protein, 9 aa, Homo sapiens
FLSSKVLEL

SEQ ID NO: 5055 - protein, 9 aa, Homo sapiens
FLSTLEHHL

SEQ ID NO: 5056 - protein, 9 aa, Homo sapiens
FLTAVAHRL

SEQ ID NO: 5057 - protein, 10 aa, Homo sapiens
FLTDLEDLTL

SEQ ID NO: 5058 - protein, 9 aa, Homo sapiens
FLTEHNSNV

SEQ ID NO: 5059 - protein, 9 aa, Homo sapiens
FLTEINSTV

SEQ ID NO: 5060 - protein, 9 aa, Homo sapiens
FLTELAERV

SEQ ID NO: 5061 - protein, 9 aa, Homo sapiens
FLTELTRLF

SEQ ID NO: 5062 - protein, 9 aa, Homo sapiens
FLTEMVHFI

SEQ ID NO: 5063 - protein, 9 aa, Homo sapiens
FLTFPIYKV

SEQ ID NO: 5064 - protein, 8 aa, Homo sapiens
FLTGTLQN

SEQ ID NO: 5065 - protein, 9 aa, Homo sapiens
FLTRIISQL

SEQ ID NO: 5066 - protein, 9 aa, Homo sapiens
FLTRLQVHL

SEQ ID NO: 5067 - protein, 9 aa, Homo sapiens
FLTSVVELI

SEQ ID NO: 5068 - protein, 9 aa, Homo sapiens
FLVDIMEHL

SEQ ID NO: 5069 - protein, 9 aa, Homo sapiens
FLVDMTMHL

SEQ ID NO: 5070 - protein, 10 aa, Homo sapiens
FLVEGLFMRV

SEQ ID NO: 5071 - protein, 10 aa, Homo sapiens
FLVEKQPPQV

SEQ ID NO: 5072 - protein, 11 aa, Homo sapiens
FLVEPQEDTRL

SEQ ID NO: 5073 - protein, 9 aa, Homo sapiens
FLVERLLHI

SEQ ID NO: 5074 - protein, 11 aa, Homo sapiens
FLVPIESIERA

SEQ ID NO: 5075 - protein, 9 aa, Homo sapiens
FLVQAKTYL

SEQ ID NO: 5076 - protein, 9 aa, Homo sapiens
FLWAYAAQL

SEQ ID NO: 5077 - protein, 11 aa, Homo sapiens
FLWDAAAGMEL

SEQ ID NO: 5078 - protein, 10 aa, Homo sapiens
FLWDGEDSSF

SEQ ID NO: 5079 - protein, 9 aa, Homo sapiens
FLWEAESHA

SEQ ID NO: 5080 - protein, 10 aa, Homo sapiens
FLWEEKFNSL

SEQ ID NO: 5081 - protein, 10 aa, Homo sapiens
FLWEYGDLHL

SEQ ID NO: 5082 - protein, 9 aa, Homo sapiens
FLWKEPATM

SEQ ID NO: 5083 - protein, 9 aa, Homo sapiens
FLWNVFQRV

SEQ ID NO: 5084 - protein, 10 aa, Homo sapiens
FLWVGATPHL

SEQ ID NO: 5085 - protein, 9 aa, Homo sapiens
FLYASGLGV

SEQ ID NO: 5086 - protein, 11 aa, Homo sapiens
FLYDHIQPVRA

SEQ ID NO: 5087 - protein, 9 aa, Homo sapiens
FLYKKLPSV

SEQ ID NO: 5088 - protein, 9 aa, Homo sapiens
FLYLAKVYV

SEQ ID NO: 5089 - protein, 10 aa, Homo sapiens
FLYNLTLQRA

SEQ ID NO: 5090 - protein, 11 aa, Homo sapiens
FLYPAAQLQHL

SEQ ID NO: 5091 - protein, 9 aa, Homo sapiens
FLYPFLSHL

SEQ ID NO: 5092 - protein, 9 aa, Homo sapiens
FLYSETWNI

SEQ ID NO: 5093 - protein, 9 aa, Homo sapiens
FLYSLLMKL

SEQ ID NO: 5094 - protein, 10 aa, Homo sapiens
FLYTGEGDTV

SEQ ID NO: 5095 - protein, 9 aa, Homo sapiens
FMATIAEGL

SEQ ID NO: 5096 - protein, 9 aa, Homo sapiens
FMLKDMLYL

SEQ ID NO: 5097 - protein, 10 aa, Homo sapiens
FMQDPMEVFV

SEQ ID NO: 5098 - protein, 9 aa, Homo sapiens
FMSEYLIEL

SEQ ID NO: 5099 - protein, 9 aa, Homo sapiens
FMTTNVPNV

SEQ ID NO: 5100 - protein, 11 aa, Homo sapiens
FQFVGIENIHV

SEQ ID NO: 5101 - protein, 11 aa, Homo sapiens
FQHEENLLQQV

SEQ ID NO: 5102 - protein, 9 aa, Homo sapiens
FQLPIRFNL

SEQ ID NO: 5103 - protein, 9 aa, Homo sapiens
FQYVHEHYL

SEQ ID NO: 5104 - protein, 10 aa, Homo sapiens
FTFEGKLEAA

SEQ ID NO: 5105 - protein, 9 aa, Homo sapiens
FVIAELVNV

SEQ ID NO: 5106 - protein, 9 aa, Homo sapiens
FVIDLQTRL

SEQ ID NO: 5107 - protein, 11 aa, Homo sapiens
FVMEGVKNLVL

SEQ ID NO: 5108 - protein, 9 aa, Homo sapiens
FVMETFVHL

SEQ ID NO: 5109 - protein, 11 aa, Homo sapiens
FVQEVVQSQQV

SEQ ID NO: 5110 - protein, 9 aa, Homo sapiens
FVSPPPPTA

SEQ ID NO: 5111 - protein, 9 aa, Homo sapiens
FVWEASHYL

SEQ ID NO: 5112 - protein, 9 aa, Homo sapiens
GIQSSAISV

SEQ ID NO: 5113 - protein, 10 aa, Homo sapiens
GISRQGIIAV

SEQ ID NO: 5114 - protein, 9 aa, Homo sapiens
GITGLVLSI

SEQ ID NO: 5115 - protein, 10 aa, Homo sapiens
GLAAFLLQHV

SEQ ID NO: 5116 - protein, 9 aa, Homo sapiens
GLAAKLMEL

SEQ ID NO: 5117 - protein, 9 aa, Homo sapiens
GLAALAVHL

SEQ ID NO: 5118 - protein, 9 aa, Homo sapiens
GLAAQPPAA

SEQ ID NO: 5119 - protein, 9 aa, Homo sapiens
GLAAVFDTV

SEQ ID NO: 5120 - protein, 9 aa, Homo sapiens
GLADITQQL

SEQ ID NO: 5121 - protein, 10 aa, Homo sapiens
GLADLSELQL

SEQ ID NO: 5122 - protein, 10 aa, Homo sapiens
GLADPAPVAV

SEQ ID NO: 5123 - protein, 11 aa, Homo sapiens
GLADPSALTQA

SEQ ID NO: 5124 - protein, 11 aa, Homo sapiens
GLAEDIDKGEV

SEQ ID NO: 5125 - protein, 9 aa, Homo sapiens
GLAEFQENV

SEQ ID NO: 5126 - protein, 10 aa, Homo sapiens
GLAELRHLNL

SEQ ID NO: 5127 - protein, 11 aa, Homo sapiens
GLAGIVGYHTV

SEQ ID NO: 5128 - protein, 9 aa, Homo sapiens
GLAGYVEAL

SEQ ID NO: 5129 - protein, 9 aa, Homo sapiens
GLAKLIADV

SEQ ID NO: 5130 - protein, 11 aa, Homo sapiens
GLAMVEAISYV

SEQ ID NO: 5131 - protein, 9 aa, Homo sapiens
GLAPLHIQL

SEQ ID NO: 5132 - protein, 9 aa, Homo sapiens
GLAPTSPHL

SEQ ID NO: 5133 - protein, 9 aa, Homo sapiens
GLAPTVPQT

SEQ ID NO: 5134 - protein, 9 aa, Homo sapiens
GLAVKEWLL

SEQ ID NO: 5135 - protein, 9 aa, Homo sapiens
GLAVLAVVV

SEQ ID NO: 5136 - protein, 9 aa, Homo sapiens
GLDELFVQV

SEQ ID NO: 5137 - protein, 10 aa, Homo sapiens
GLDIEGVKTV

SEQ ID NO: 5138 - protein, 11 aa, Homo sapiens
GLDNAVSLFQV

SEQ ID NO: 5139 - protein, 9 aa, Homo sapiens
GLDNQIQEI

SEQ ID NO: 5140 - protein, 10 aa, Homo sapiens
GLDPGKQIKL

SEQ ID NO: 5141 - protein, 10 aa, Homo sapiens
GLDPSTPAQV

SEQ ID NO: 5142 - protein, 11 aa, Homo sapiens
GLDPTGTVILL

SEQ ID NO: 5143 - protein, 9 aa, Homo sapiens
GLDSGFHSV

SEQ ID NO: 5144 - protein, 9 aa, Homo sapiens
GLELTRVTV

SEQ ID NO: 5145 - protein, 9 aa, Homo sapiens
GLFAPVHKV

SEQ ID NO: 5146 - protein, 9 aa, Homo sapiens
GLFPTSHSV

SEQ ID NO: 5147 - protein, 9 aa, Homo sapiens
GLFPWTPKL

SEQ ID NO: 5148 - protein, 10 aa, Homo sapiens
GLFSKILDEV

SEQ ID NO: 5149 - protein, 11 aa, Homo sapiens
GLFTLSHITQL

SEQ ID NO: 5150 - protein, 11 aa, Homo sapiens
GLGEGFQTVRV

SEQ ID NO: 5151 - protein, 9 aa, Homo sapiens
GLGIILDSV

SEQ ID NO: 5152 - protein, 8 aa, Homo sapiens
GLGVFVQL

SEQ ID NO: 5153 - protein, 9 aa, Homo sapiens
GLHSYFITV

SEQ ID NO: 5154 - protein, 10 aa, Homo sapiens
GLIDAIKPFL

SEQ ID NO: 5155 - protein, 11 aa, Homo sapiens
GLIDGAVVSGI

SEQ ID NO: 5156 - protein, 11 aa, Homo sapiens
GLIDGVVEADL

SEQ ID NO: 5157 - protein, 10 aa, Homo sapiens
GLIEDYEALL

SEQ ID NO: 5158 - protein, 10 aa, Homo sapiens
GLIEKNIELF

SEQ ID NO: 5159 - protein, 9 aa, Homo sapiens
GLIFVITGV

SEQ ID NO: 5160 - protein, 9 aa, Homo sapiens
GLIKAIMHL

SEQ ID NO: 5161 - protein, 10 aa, Homo sapiens
GLILSQLGDL

SEQ ID NO: 5162 - protein, 11 aa, Homo sapiens
GLIQEINDLRL

SEQ ID NO: 5163 - protein, 10 aa, Homo sapiens
GLIQIELTKA

SEQ ID NO: 5164 - protein, 10 aa, Homo sapiens
GLIQNGDWTF

SEQ ID NO: 5165 - protein, 9 aa, Homo sapiens
GLKIEELTL

SEQ ID NO: 5166 - protein, 9 aa, Homo sapiens
GLLAAFPKL

SEQ ID NO: 5167 - protein, 9 aa, Homo sapiens
GLLAKIFEL

SEQ ID NO: 5168 - protein, 11 aa, Homo sapiens
GLLALGDYMNV

SEQ ID NO: 5169 - protein, 10 aa, Homo sapiens
GLLAPAPAQA

SEQ ID NO: 5170 - protein, 11 aa, Homo sapiens
GLLDLPFRVGV

SEQ ID NO: 5171 - protein, 10 aa, Homo sapiens
GLLDPSVFHV

SEQ ID NO: 5172 - protein, 11 aa, Homo sapiens
GLLDQDTGLVL

SEQ ID NO: 5173 - protein, 10 aa, Homo sapiens
GLLDQHGVRL

SEQ ID NO: 5174 - protein, 9 aa, Homo sapiens
GLLDSPTSI

SEQ ID NO: 5175 - protein, 11 aa, Homo sapiens
GLLEARGILGL

SEQ ID NO: 5176 - protein, 9 aa, Homo sapiens
GLLEKAVLL

SEQ ID NO: 5177 - protein, 9 aa, Homo sapiens
GLLEKLTAI

SEQ ID NO: 5178 - protein, 9 aa, Homo sapiens
GLLENELKL

SEQ ID NO: 5179 - protein, 9 aa, Homo sapiens
GLLERPVLL

SEQ ID NO: 5180 - protein, 9 aa, Homo sapiens
GLLERVKEL

SEQ ID NO: 5181 - protein, 11 aa, Homo sapiens
GLLERVKELQA

SEQ ID NO: 5182 - protein, 11 aa, Homo sapiens
GLLESHGIQKV

SEQ ID NO: 5183 - protein, 11 aa, Homo sapiens
GLLESRLDPYL

SEQ ID NO: 5184 - protein, 8 aa, Homo sapiens
GLLGELIL

SEQ ID NO: 5185 - protein, 9 aa, Homo sapiens
GLLGYLHFV

SEQ ID NO: 5186 - protein, 9 aa, Homo sapiens
GLLHLTLLL

SEQ ID NO: 5187 - protein, 9 aa, Homo sapiens
GLLHVFVRV

SEQ ID NO: 5188 - protein, 11 aa, Homo sapiens
GLLKLPEDALV

SEQ ID NO: 5189 - protein, 11 aa, Homo sapiens
GLLKPSETLSL

SEQ ID NO: 5190 - protein, 10 aa, Homo sapiens
GLLLLGGGLL

SEQ ID NO: 5191 - protein, 10 aa, Homo sapiens
GLLNSQNPFL

SEQ ID NO: 5192 - protein, 10 aa, Homo sapiens
GLLPAVKVFL

SEQ ID NO: 5193 - protein, 9 aa, Homo sapiens
GLLPSPLAV

SEQ ID NO: 5194 - protein, 10 aa, Homo sapiens
GLLPSPLAVA

SEQ ID NO: 5195 - protein, 9 aa, Homo sapiens
GLLQEVARI

SEQ ID NO: 5196 - protein, 11 aa, Homo sapiens
GLLQQPSALML

SEQ ID NO: 5197 - protein, 11 aa, Homo sapiens
GLLRDEALAEV

SEQ ID NO: 5198 - protein, 8 aa, Homo sapiens
GLLSDPEL

SEQ ID NO: 5199 - protein, 9 aa, Homo sapiens
GLLSIFTKV

SEQ ID NO: 5200 - protein, 10 aa, Homo sapiens
GLLSNPQAHV

SEQ ID NO: 5201 - protein, 9 aa, Homo sapiens
GLLSNVSHV

SEQ ID NO: 5202 - protein, 10 aa, Homo sapiens
GLLTGILETV

SEQ ID NO: 5203 - protein, 9 aa, Homo sapiens
GLLWQVIKI

SEQ ID NO: 5204 - protein, 11 aa, Homo sapiens
GLLYPTEDYKV

SEQ ID NO: 5205 - protein, 10 aa, Homo sapiens
GLMDGSPHFL

SEQ ID NO: 5206 - protein, 9 aa, Homo sapiens
GLMEDPMKV

SEQ ID NO: 5207 - protein, 11 aa, Homo sapiens
GLMGEGLAPHL

SEQ ID NO: 5208 - protein, 9 aa, Homo sapiens
GLMGISSTL

SEQ ID NO: 5209 - protein, 9 aa, Homo sapiens
GLMKIVKEA

SEQ ID NO: 5210 - protein, 9 aa, Homo sapiens
GLMLQHITL

SEQ ID NO: 5211 - protein, 9 aa, Homo sapiens
GLMNLPPSI

SEQ ID NO: 5212 - protein, 10 aa, Homo sapiens
GLMNRRDAIA

SEQ ID NO: 5213 - protein, 9 aa, Homo sapiens
GLMTSLVAV

SEQ ID NO: 5214 - protein, 9 aa, Homo sapiens
GLNSLTYQV

SEQ ID NO: 5215 - protein, 11 aa, Homo sapiens
GLQEKLKQLEP

SEQ ID NO: 5216 - protein, 9 aa, Homo sapiens
GLRESEEKL

SEQ ID NO: 5217 - protein, 9 aa, Homo sapiens
GLSAFLHAL

SEQ ID NO: 5218 - protein, 10 aa, Homo sapiens
GLSEKLLAYV

SEQ ID NO: 5219 - protein, 9 aa, Homo sapiens
GLSEQIREL

SEQ ID NO: 5220 - protein, 9 aa, Homo sapiens
GLSGIIPTL

SEQ ID NO: 5221 - protein, 10 aa, Homo sapiens
GLSIADQITL

SEQ ID NO: 5222 - protein, 9 aa, Homo sapiens
GLSPLSPTV

SEQ ID NO: 5223 - protein, 9 aa, Homo sapiens
GLSSLSIHL

SEQ ID NO: 5224 - protein, 10 aa, Homo sapiens
GLTETGLYRI

SEQ ID NO: 5225 - protein, 9 aa, Homo sapiens
GLTEVTQSL

SEQ ID NO: 5226 - protein, 10 aa, Homo sapiens
GLTHTAVVPL

SEQ ID NO: 5227 - protein, 9 aa, Homo sapiens
GLTIVIAGM

SEQ ID NO: 5228 - protein, 9 aa, Homo sapiens
GLTSGRWFL

SEQ ID NO: 5229 - protein, 10 aa, Homo sapiens
GLTVKIGDFG

SEQ ID NO: 5230 - protein, 9 aa, Homo sapiens
GLVATVKEA

SEQ ID NO: 5231 - protein, 9 aa, Homo sapiens
GLVDKFPHL

SEQ ID NO: 5232 - protein, 9 aa, Homo sapiens
GLVEQLYDL

SEQ ID NO: 5233 - protein, 9 aa, Homo sapiens
GLVNDLARV

SEQ ID NO: 5234 - protein, 9 aa, Homo sapiens
GLVNYQISV

SEQ ID NO: 5235 - protein, 9 aa, Homo sapiens
GLVRPPPGL

SEQ ID NO: 5236 - protein, 9 aa, Homo sapiens
GLVVVNHYL

SEQ ID NO: 5237 - protein, 10 aa, Homo sapiens
GLWEGALYEI

SEQ ID NO: 5238 - protein, 10 aa, Homo sapiens
GLWHGVLTSV

SEQ ID NO: 5239 - protein, 9 aa, Homo sapiens
GLWKDSLFL

SEQ ID NO: 5240 - protein, 10 aa, Homo sapiens
GLYDGPVCEV

SEQ ID NO: 5241 - protein, 9 aa, Homo sapiens
GLYEKMEQV

SEQ ID NO: 5242 - protein, 9 aa, Homo sapiens
GLYEQAFQL

SEQ ID NO: 5243 - protein, 9 aa, Homo sapiens
GLYERPTAA

SEQ ID NO: 5244 - protein, 9 aa, Homo sapiens
GLYETVNEV

SEQ ID NO: 5245 - protein, 9 aa, Homo sapiens
GLYHTSPSL

SEQ ID NO: 5246 - protein, 10 aa, Toxoplasma gondii ME49
GMLDPLEVHL

SEQ ID NO: 5247 - protein, 11 aa, Homo sapiens
GMWNPNAPVFL

SEQ ID NO: 5248 - protein, 9 aa, Homo sapiens
GMYETPLFL

SEQ ID NO: 5249 - protein, 9 aa, Homo sapiens
GQVERFETV

SEQ ID NO: 5250 - protein, 9 aa, Homo sapiens
GSLGLIFAL

SEQ ID NO: 5251 - protein, 10 aa, Homo sapiens
GVIAEILRGV

SEQ ID NO: 5252 - protein, 11 aa, Homo sapiens
GVIKVFNDMKV

SEQ ID NO: 5253 - protein, 11 aa, Homo sapiens
GVLEMERLHYI

SEQ ID NO: 5254 - protein, 10 aa, Homo sapiens
GVMAGDIYSV

SEQ ID NO: 5255 - protein, 9 aa, Homo sapiens
GVMESVIAL

SEQ ID NO: 5256 - protein, 11 aa, Homo sapiens
HILEEKGLSQV

SEQ ID NO: 5257 - protein, 10 aa, Homo sapiens
HLADLADFAL

SEQ ID NO: 5258 - protein, 11 aa, Homo sapiens
HLADLPVEPHL

SEQ ID NO: 5259 - protein, 11 aa, Homo sapiens
HLAEFHQIEGV

SEQ ID NO: 5260 - protein, 9 aa, Homo sapiens
HLAEVSAEV

SEQ ID NO: 5261 - protein, 9 aa, Homo sapiens
HLAKLVSLV

SEQ ID NO: 5262 - protein, 9 aa, Homo sapiens
HLANIVERL

SEQ ID NO: 5263 - protein, 9 aa, Homo sapiens
HLANTYISV

SEQ ID NO: 5264 - protein, 9 aa, Homo sapiens
HLAPNTFNV

SEQ ID NO: 5265 - protein, 9 aa, Homo sapiens
HLDEAIHVL

SEQ ID NO: 5266 - protein, 9 aa, Homo sapiens
HLDKKTQTP

SEQ ID NO: 5267 - protein, 10 aa, Homo sapiens
HLDLPSNNNL

SEQ ID NO: 5268 - protein, 9 aa, Homo sapiens
HLDPAVKEV

SEQ ID NO: 5269 - protein, 9 aa, Homo sapiens
HLDRLVPLV

SEQ ID NO: 5270 - protein, 9 aa, Homo sapiens
HLDTVPPSV

SEQ ID NO: 5271 - protein, 9 aa, Homo sapiens
HLDVKPANI

SEQ ID NO: 5272 - protein, 9 aa, Homo sapiens
HLFDAFVSV

SEQ ID NO: 5273 - protein, 9 aa, Homo sapiens
HLFDTLHAL

SEQ ID NO: 5274 - protein, 11 aa, Homo sapiens
HLFEDAYLLTL

SEQ ID NO: 5275 - protein, 10 aa, Homo sapiens
HLFEGSNTSL

SEQ ID NO: 5276 - protein, 9 aa, Homo sapiens
HLFENLLRL

SEQ ID NO: 5277 - protein, 9 aa, Homo sapiens
HLFEYYHRL

SEQ ID NO: 5278 - protein, 9 aa, Homo sapiens
HLFGALVLL

SEQ ID NO: 5279 - protein, 9 aa, Homo sapiens
HLFKDKVVL

SEQ ID NO: 5280 - protein, 9 aa, Homo sapiens
HLFRDVAEV

SEQ ID NO: 5281 - protein, 9 aa, Homo sapiens
HLFTATINL

SEQ ID NO: 5282 - protein, 9 aa, Homo sapiens
HLGDRPIPV

SEQ ID NO: 5283 - protein, 9 aa, Homo sapiens
HLGEYQAAV

SEQ ID NO: 5284 - protein, 9 aa, Homo sapiens
HLIEAVEAI

SEQ ID NO: 5285 - protein, 9 aa, Homo sapiens
HLIEESVKL

SEQ ID NO: 5286 - protein, 10 aa, Homo sapiens
HLIEQDFPGM

SEQ ID NO: 5287 - protein, 9 aa, Homo sapiens
HLIHEVTKV

SEQ ID NO: 5288 - protein, 10 aa, Homo sapiens
HLINVEGVGV

SEQ ID NO: 5289 - protein, 9 aa, Homo sapiens
HLISTINTV

SEQ ID NO: 5290 - protein, 10 aa, Homo sapiens
HLKEDQTEYL

SEQ ID NO: 5291 - protein, 11 aa, Homo sapiens
HLLDHLSIVYV

SEQ ID NO: 5292 - protein, 9 aa, Homo sapiens
HLLDNTERL

SEQ ID NO: 5293 - protein, 9 aa, Homo sapiens
HLLEADIKL

SEQ ID NO: 5294 - protein, 10 aa, Homo sapiens
HLLEGQNASV

SEQ ID NO: 5295 - protein, 9 aa, Homo sapiens
HLLERSWYA

SEQ ID NO: 5296 - protein, 9 aa, Homo sapiens
HLLGRLAAI

SEQ ID NO: 5297 - protein, 11 aa, Homo sapiens
HLLGSEQQSSV

SEQ ID NO: 5298 - protein, 9 aa, Homo sapiens
HLLPHVLQV

SEQ ID NO: 5299 - protein, 9 aa, Homo sapiens
HLLPTQLEV

SEQ ID NO: 5300 - protein, 9 aa, Homo sapiens
HLLQELSQV

SEQ ID NO: 5301 - protein, 9 aa, Homo sapiens
HLLRFLEAV

SEQ ID NO: 5302 - protein, 9 aa, Homo sapiens
HLLTHIQAV

SEQ ID NO: 5303 - protein, 9 aa, Homo sapiens
HLMHTSYFL

SEQ ID NO: 5304 - protein, 9 aa, Homo sapiens
HLMPHLLTL

SEQ ID NO: 5305 - protein, 9 aa, Homo sapiens
HLMQTSFQL

SEQ ID NO: 5306 - protein, 9 aa, Homo sapiens
HLMTKVEEL

SEQ ID NO: 5307 - protein, 9 aa, Homo sapiens
HLPPTFHAV

SEQ ID NO: 5308 - protein, 9 aa, Homo sapiens
HLQEKLQSL

SEQ ID NO: 5309 - protein, 9 aa, Homo sapiens
HLSDAIVEV

SEQ ID NO: 5310 - protein, 9 aa, Homo sapiens
HLSDHLSEL

SEQ ID NO: 5311 - protein, 9 aa, Homo sapiens
HLSDLALTL

SEQ ID NO: 5312 - protein, 9 aa, Homo sapiens
HLSSIEVLI

SEQ ID NO: 5313 - protein, 9 aa, Homo sapiens
HLTEDTPKV

SEQ ID NO: 5314 - protein, 9 aa, Homo sapiens
HLTEMQAKV

SEQ ID NO: 5315 - protein, 9 aa, Homo sapiens
HLTEVLTLV

SEQ ID NO: 5316 - protein, 9 aa, Homo sapiens
HLTLVEAIK

SEQ ID NO: 5317 - protein, 10 aa, Homo sapiens
HLVPAWDHTL

SEQ ID NO: 5318 - protein, 11 aa, Homo sapiens
HLWDLQDRVLV

SEQ ID NO: 5319 - protein, 9 aa, Homo sapiens
HLWGHALFL

SEQ ID NO: 5320 - protein, 9 aa, Homo sapiens
HLWSYLITL

SEQ ID NO: 5321 - protein, 11 aa, Homo sapiens
HLYDKGSTIFL

SEQ ID NO: 5322 - protein, 9 aa, Homo sapiens
HLYDYTVKL

SEQ ID NO: 5323 - protein, 10 aa, Homo sapiens
HLYEEKFESI

SEQ ID NO: 5324 - protein, 10 aa, Homo sapiens
HLYRGIFPVL

SEQ ID NO: 5325 - protein, 9 aa, Homo sapiens
HLYSRIPGL

SEQ ID NO: 5326 - protein, 9 aa, Homo sapiens
HTDDHMALL

SEQ ID NO: 5327 - protein, 9 aa, Homo sapiens
IIDGKIFCV

SEQ ID NO: 5328 - protein, 11 aa, Homo sapiens
ILADLPRNIML

SEQ ID NO: 5329 - protein, 9 aa, Homo sapiens
ILAEGITIV

SEQ ID NO: 5330 - protein, 9 aa, Homo sapiens
ILAELLLRV

SEQ ID NO: 5331 - protein, 9 aa, Homo sapiens
ILAENILSI

SEQ ID NO: 5332 - protein, 9 aa, Homo sapiens
ILAETQPEL

SEQ ID NO: 5333 - protein, 11 aa, Homo sapiens
ILAGTSGLQQV

SEQ ID NO: 5334 - protein, 11 aa, Homo sapiens
ILANDGVLLAA

SEQ ID NO: 5335 - protein, 9 aa, Homo sapiens
ILANNCPAL

SEQ ID NO: 5336 - protein, 9 aa, Homo sapiens
ILAPELSHA

SEQ ID NO: 5337 - protein, 9 aa, Homo sapiens
ILAPSLAKV

SEQ ID NO: 5338 - protein, 9 aa, Homo sapiens
ILAPTVQEL

SEQ ID NO: 5339 - protein, 11 aa, Homo sapiens
ILAQEQLVVGV

SEQ ID NO: 5340 - protein, 9 aa, Homo sapiens
ILATAVYQA

SEQ ID NO: 5341 - protein, 9 aa, Homo sapiens
ILATMNVPA

SEQ ID NO: 5342 - protein, 11 aa, Homo sapiens
ILDAAGANLKV

SEQ ID NO: 5343 - protein, 9 aa, Homo sapiens
ILDDIIASV

SEQ ID NO: 5344 - protein, 10 aa, Homo sapiens
ILDDVSLTHL

SEQ ID NO: 5345 - protein, 10 aa, Homo sapiens
ILDEAHERTI

SEQ ID NO: 5346 - protein, 10 aa, Homo sapiens
ILDEAHERTL

SEQ ID NO: 5347 - protein, 9 aa, Homo sapiens
ILDEMSHKL

SEQ ID NO: 5348 - protein, 9 aa, Homo sapiens
ILDEPTNHL

SEQ ID NO: 5349 - protein, 9 aa, Homo sapiens
ILDEPTNNL

SEQ ID NO: 5350 - protein, 9 aa, Homo sapiens
ILDESHERV

SEQ ID NO: 5351 - protein, 9 aa, Homo sapiens
ILDEVIFKL

SEQ ID NO: 5352 - protein, 9 aa, Homo sapiens
ILDKATEYI

SEQ ID NO: 5353 - protein, 9 aa, Homo sapiens
ILDQSRETV

SEQ ID NO: 5354 - protein, 9 aa, Homo sapiens
ILDQTNVSA

SEQ ID NO: 5355 - protein, 9 aa, Homo sapiens
ILDRLTTKV

SEQ ID NO: 5356 - protein, 9 aa, Homo sapiens
ILDRMLPEL

SEQ ID NO: 5357 - protein, 10 aa, Homo sapiens
ILDSGATHTT

SEQ ID NO: 5358 - protein, 9 aa, Homo sapiens
ILDSVLHHL

SEQ ID NO: 5359 - protein, 9 aa, Homo sapiens
ILEENIPVL

SEQ ID NO: 5360 - protein, 11 aa, Homo sapiens
ILEEQPMDMLL

SEQ ID NO: 5361 - protein, 11 aa, Homo sapiens
ILFELLKSLEA

SEQ ID NO: 5362 - protein, 9 aa, Homo sapiens
ILFGLIKDV

SEQ ID NO: 5363 - protein, 9 aa, Homo sapiens
ILFNKLWEL

SEQ ID NO: 5364 - protein, 11 aa, Homo sapiens
ILFPIKQPITV

SEQ ID NO: 5365 - protein, 9 aa, Homo sapiens
ILGDFLVAV

SEQ ID NO: 5366 - protein, 9 aa, Homo sapiens
ILGDILLSA

SEQ ID NO: 5367 - protein, 10 aa, Homo sapiens
ILGGLFPVHA

SEQ ID NO: 5368 - protein, 11 aa, Homo sapiens
ILGGPGTVQGV

SEQ ID NO: 5369 - protein, 9 aa, Homo sapiens
ILGPKPQGV

SEQ ID NO: 5370 - protein, 11 aa, Homo sapiens
ILGPPPPSFHL

SEQ ID NO: 5371 - protein, 11 aa, Homo sapiens
ILGTEDLIVEV

SEQ ID NO: 5372 - protein, 9 aa, Homo sapiens
ILGTHNITV

SEQ ID NO: 5373 - protein, 9 aa, Homo sapiens
ILHENFTTV

SEQ ID NO: 5374 - protein, 9 aa, Homo sapiens
ILHGLVAAV

SEQ ID NO: 5375 - protein, 9 aa, Homo sapiens
ILHHVNIGL

SEQ ID NO: 5376 - protein, 9 aa, Homo sapiens
ILHSVTTNL

SEQ ID NO: 5377 - protein, 9 aa, Homo sapiens
ILHTLLTLV

SEQ ID NO: 5378 - protein, 9 aa, Homo sapiens
ILIDEVDKI

SEQ ID NO: 5379 - protein, 11 aa, Homo sapiens
ILIDKSGKLEL

SEQ ID NO: 5380 - protein, 9 aa, Homo sapiens
ILIKGLAKL

SEQ ID NO: 5381 - protein, 9 aa, Homo sapiens
ILIPNVETI

SEQ ID NO: 5382 - protein, 10 aa, Homo sapiens
ILKDVIPPLE

SEQ ID NO: 5383 - protein, 9 aa, Homo sapiens
ILKETIEIL

SEQ ID NO: 5384 - protein, 9 aa, Homo sapiens
ILKQLQIIL

SEQ ID NO: 5385 - protein, 9 aa, Homo sapiens
ILKSALQVE

SEQ ID NO: 5386 - protein, 11 aa, Homo sapiens
ILLAEGRLVNL

SEQ ID NO: 5387 - protein, 9 aa, Homo sapiens
ILLAEVDKV

SEQ ID NO: 5388 - protein, 11 aa, Homo sapiens
ILLDDNMQIRL

SEQ ID NO: 5389 - protein, 11 aa, Homo sapiens
ILLDDQFQPKL

SEQ ID NO: 5390 - protein, 11 aa, Homo sapiens
ILLDEEGHIKI

SEQ ID NO: 5391 - protein, 11 aa, Homo sapiens
ILLDEEGHIKL

SEQ ID NO: 5392 - protein, 11 aa, Homo sapiens
ILLDHEKEWKL

SEQ ID NO: 5393 - protein, 10 aa, Homo sapiens
ILLDKLLIRL

SEQ ID NO: 5394 - protein, 11 aa, Homo sapiens
ILLEELDLEKL

SEQ ID NO: 5395 - protein, 9 aa, Homo sapiens
ILLEGTMNL

SEQ ID NO: 5396 - protein, 9 aa, Homo sapiens
ILLEHIIMC

SEQ ID NO: 5397 - protein, 9 aa, Homo sapiens
ILLEHKVVL

SEQ ID NO: 5398 - protein, 9 aa, Homo sapiens
ILLEMIHSI

SEQ ID NO: 5399 - protein, 10 aa, Homo sapiens
ILLESHMVMI

SEQ ID NO: 5400 - protein, 11 aa, Homo sapiens
ILLGRIKDLEL

SEQ ID NO: 5401 - protein, 8 aa, Artificial Sequence
  unknown
ILLGVNSY

SEQ ID NO: 5402 - protein, 9 aa, Homo sapiens
ILLHQVEAL

SEQ ID NO: 5403 - protein, 9 aa, Homo sapiens
ILLKALTNL

SEQ ID NO: 5404 - protein, 9 aa, Homo sapiens
ILLKEIILV

SEQ ID NO: 5405 - protein, 11 aa, Homo sapiens
ILLNEDDLVTI

SEQ ID NO: 5406 - protein, 9 aa, Homo sapiens
ILLNIIERL

SEQ ID NO: 5407 - protein, 11 aa, Homo sapiens
ILLPEEQQLLL

SEQ ID NO: 5408 - protein, 9 aa, Artificial Sequence
  unknown
ILLPFTEQL

SEQ ID NO: 5409 - protein, 9 aa, Homo sapiens
ILLPRIIEA

SEQ ID NO: 5410 - protein, 9 aa, Homo sapiens
ILLPRPPQV

SEQ ID NO: 5411 - protein, 9 aa, Homo sapiens
ILLQQQQQL

SEQ ID NO: 5412 - protein, 11 aa, Homo sapiens
ILLQVAALKYI

SEQ ID NO: 5413 - protein, 10 aa, Homo sapiens
ILLSGASPFL

SEQ ID NO: 5414 - protein, 11 aa, Homo sapiens
ILLTEPGQVKL

SEQ ID NO: 5415 - protein, 9 aa, Homo sapiens
ILMDERTFL

SEQ ID NO: 5416 - protein, 8 aa, Homo sapiens
ILMEHIHK

SEQ ID NO: 5417 - protein, 9 aa, Homo sapiens
ILMEKYLKL

SEQ ID NO: 5418 - protein, 9 aa, Homo sapiens
ILMGHSLYM

SEQ ID NO: 5419 - protein, 9 aa, Homo sapiens
ILMHSPPSA

SEQ ID NO: 5420 - protein, 11 aa, Homo sapiens
ILMPNGAVAAV

SEQ ID NO: 5421 - protein, 9 aa, Homo sapiens
ILMQNIETV

SEQ ID NO: 5422 - protein, 11 aa, Homo sapiens
ILMSPNSYIKL

SEQ ID NO: 5423 - protein, 11 aa, Homo sapiens
ILNDPSQSEVM

SEQ ID NO: 5424 - protein, 10 aa, Homo sapiens
ILNEFPGHGL

SEQ ID NO: 5425 - protein, 9 aa, Homo sapiens
ILNEIVNFV

SEQ ID NO: 5426 - protein, 9 aa, Homo sapiens
ILNEQAAKV

SEQ ID NO: 5427 - protein, 10 aa, Homo sapiens
ILNETGKILL

SEQ ID NO: 5428 - protein, 9 aa, Homo sapiens
ILNEVDISV

SEQ ID NO: 5429 - protein, 9 aa, Homo sapiens
ILNNHTWNL

SEQ ID NO: 5430 - protein, 9 aa, Homo sapiens
ILNPHVHVI

SEQ ID NO: 5431 - protein, 9 aa, Homo sapiens
ILNSTTIEI

SEQ ID NO: 5432 - protein, 9 aa, Homo sapiens
ILNTLNITV

SEQ ID NO: 5433 - protein, 9 aa, Homo sapiens
ILNYVLVRV

SEQ ID NO: 5434 - protein, 10 aa, Homo sapiens
ILPGSLTASL

SEQ ID NO: 5435 - protein, 9 aa, Homo sapiens
ILQDLQPFL

SEQ ID NO: 5436 - protein, 10 aa, Homo sapiens
ILQDLTFVHL

SEQ ID NO: 5437 - protein, 9 aa, Homo sapiens
ILQEFESKL

SEQ ID NO: 5438 - protein, 11 aa, Homo sapiens
ILQENLKDIML

SEQ ID NO: 5439 - protein, 9 aa, Homo sapiens
ILQESLIKL

SEQ ID NO: 5440 - protein, 8 aa, Homo sapiens
ILQLSLAL

SEQ ID NO: 5441 - protein, 9 aa, Homo sapiens
ILQPMDIHV

SEQ ID NO: 5442 - protein, 10 aa, Homo sapiens
ILQSKEPAYV

SEQ ID NO: 5443 - protein, 10 aa, Homo sapiens
ILQTIESGGL

SEQ ID NO: 5444 - protein, 9 aa, Homo sapiens
ILRAILEVL

SEQ ID NO: 5445 - protein, 9 aa, Homo sapiens
ILRDTSEDL

SEQ ID NO: 5446 - protein, 9 aa, Homo sapiens
ILSEFSSKL

SEQ ID NO: 5447 - protein, 9 aa, Homo sapiens
ILSEIKEAV

SEQ ID NO: 5448 - protein, 9 aa, Homo sapiens
ILSELLSNL

SEQ ID NO: 5449 - protein, 9 aa, Homo sapiens
ILSESLHSL

SEQ ID NO: 5450 - protein, 9 aa, Homo sapiens
ILSGNAAHW

SEQ ID NO: 5451 - protein, 9 aa, Homo sapiens
ILSGNTAHW

SEQ ID NO: 5452 - protein, 9 aa, Homo sapiens
ILSRVTESV

SEQ ID NO: 5453 - protein, 9 aa, Homo sapiens
ILSVVNSQL

SEQ ID NO: 5454 - protein, 9 aa, Homo sapiens
ILTEAIKAC

SEQ ID NO: 5455 - protein, 10 aa, Homo sapiens
ILTELGGFEV

SEQ ID NO: 5456 - protein, 9 aa, Homo sapiens
ILTEVNYEV

SEQ ID NO: 5457 - protein, 9 aa, Homo sapiens
ILTGTPPGV

SEQ ID NO: 5458 - protein, 9 aa, Homo sapiens
ILTKILYLI

SEQ ID NO: 5459 - protein, 9 aa, Homo sapiens
ILTKILYLL

SEQ ID NO: 5460 - protein, 9 aa, Homo sapiens
ILTQSVENV

SEQ ID NO: 5461 - protein, 9 aa, Homo sapiens
ILTSIQSLL

SEQ ID NO: 5462 - protein, 9 aa, Homo sapiens
ILTTLIHLV

SEQ ID NO: 5463 - protein, 9 aa, Homo sapiens
ILHGLVAAV

SEQ ID NO: 5464 - protein, 11 aa, Homo sapiens
ILVEESNVQRV

SEQ ID NO: 5465 - protein, 9 aa, Homo sapiens
ILVEKFPFV

SEQ ID NO: 5466 - protein, 9 aa, Homo sapiens
ILVESEAHV

SEQ ID NO: 5467 - protein, 10 aa, Homo sapiens
ILVIGAIVKN

SEQ ID NO: 5468 - protein, 10 aa, Homo sapiens
ILVQIEQLYV

SEQ ID NO: 5469 - protein, 9 aa, Homo sapiens
ILVSWLPRL

SEQ ID NO: 5470 - protein, 10 aa, Homo sapiens
ILWFRCLLLL

SEQ ID NO: 5471 - protein, 9 aa, Homo sapiens
ILWHFVASL

SEQ ID NO: 5472 - protein, 11 aa, Homo sapiens
ILYDHVHPVGA

SEQ ID NO: 5473 - protein, 9 aa, Homo sapiens
ILYDKYFSL

SEQ ID NO: 5474 - protein, 9 aa, Homo sapiens
ILYGTQFVL

SEQ ID NO: 5475 - protein, 10 aa, Homo sapiens
ILYSGSGILR

SEQ ID NO: 5476 - protein, 9 aa, Homo sapiens
IMDATNILV

SEQ ID NO: 5477 - protein, 10 aa, Homo sapiens
IMLKGDNITL

SEQ ID NO: 5478 - protein, 9 aa, Homo sapiens
IMTLLASFL

SEQ ID NO: 5479 - protein, 8 aa, Homo sapiens
IQDVVQPL

SEQ ID NO: 5480 - protein, 9 aa, Homo sapiens
IQHSEFEEV

SEQ ID NO: 5481 - protein, 11 aa, Homo sapiens
IQLPSEKAIFL

SEQ ID NO: 5482 - protein, 8 aa, Homo sapiens
IQNELAAI

SEQ ID NO: 5483 - protein, 9 aa, Homo sapiens
IQYDRTLLV

SEQ ID NO: 5484 - protein, 10 aa, Homo sapiens
ISLLDLPLSL

SEQ ID NO: 5485 - protein, 9 aa, Homo sapiens
ISTEVNPKL

SEQ ID NO: 5486 - protein, 9 aa, Homo sapiens
IVAESLQQV

SEQ ID NO: 5487 - protein, 9 aa, Homo sapiens
IVKDEMISV

SEQ ID NO: 5488 - protein, 9 aa, Homo sapiens
IVVDNVPQV

SEQ ID NO: 5489 - protein, 9 aa, Homo sapiens
KAMDDTFYL

SEQ ID NO: 5490 - protein, 11 aa, Homo sapiens
KAVSSAAIAEV

SEQ ID NO: 5491 - protein, 9 aa, Homo sapiens
KAYHEQLTV

SEQ ID NO: 5492 - protein, 10 aa, Homo sapiens
KIADFGLARI

SEQ ID NO: 5493 - protein, 10 aa, Homo sapiens
KIFPAALQLV

SEQ ID NO: 5494 - protein, 11 aa, Homo sapiens
KIGDFGLVTSL

SEQ ID NO: 5495 - protein, 9 aa, Toxoplasma gondii ME49
KIGEGTYGV

SEQ ID NO: 5496 - protein, 9 aa, Homo sapiens
KIIDFLSAL

SEQ ID NO: 5497 - protein, 9 aa, Homo sapiens
KIIHWPWLV

SEQ ID NO: 5498 - protein, 10 aa, Homo sapiens
KIIYIVHDEV

SEQ ID NO: 5499 - protein, 9 aa, Homo sapiens
KILAHLWHL

SEQ ID NO: 5500 - protein, 10 aa, Homo sapiens
KILDIGLAYI

SEQ ID NO: 5501 - protein, 9 aa, Homo sapiens
KILEALQRV

SEQ ID NO: 5502 - protein, 10 aa, Homo sapiens
KILEDIGLYL

SEQ ID NO: 5503 - protein, 9 aa, Homo sapiens
KILEINPKL

SEQ ID NO: 5504 - protein, 9 aa, Homo sapiens
KILETLYTL

SEQ ID NO: 5505 - protein, 9 aa, Homo sapiens
KILPVMVTL

SEQ ID NO: 5506 - protein, 9 aa, Homo sapiens
KILRLSLIL

SEQ ID NO: 5507 - protein, 10 aa, Homo sapiens
KILSGVIRSV

SEQ ID NO: 5508 - protein, 10 aa, Homo sapiens
KIMDATNILV

SEQ ID NO: 5509 - protein, 11 aa, Homo sapiens
KIMDYSLLVGI

SEQ ID NO: 5510 - protein, 9 aa, Homo sapiens
KIMEQSPDM

SEQ ID NO: 5511 - protein, 9 aa, Homo sapiens
KINEAIVAV

SEQ ID NO: 5512 - protein, 9 aa, Homo sapiens
KISTITPQI

SEQ ID NO: 5513 - protein, 9 aa, Homo sapiens
KITEYLERV

SEQ ID NO: 5514 - protein, 9 aa, Homo sapiens
KIVPIAIQL

SEQ ID NO: 5515 - protein, 11 aa, Homo sapiens
KIWDLKERTNV

SEQ ID NO: 5516 - protein, 10 aa, Homo sapiens
KLADFGLARI

SEQ ID NO: 5517 - protein, 9 aa, Homo sapiens
KLADLSLRI

SEQ ID NO: 5518 - protein, 11 aa, Homo sapiens
KLADMNQEYQL

SEQ ID NO: 5519 - protein, 9 aa, Homo sapiens
KLADSIKAI

SEQ ID NO: 5520 - protein, 9 aa, Homo sapiens
KLAEENPDL

SEQ ID NO: 5521 - protein, 9 aa, Homo sapiens
KLAEFIDFL

SEQ ID NO: 5522 - protein, 10 aa, Homo sapiens
KLAEGLDIQL

SEQ ID NO: 5523 - protein, 11 aa, Homo sapiens
KLAEGSAYEEV

SEQ ID NO: 5524 - protein, 9 aa, Homo sapiens
KLAEGVQLL

SEQ ID NO: 5525 - protein, 11 aa, Homo sapiens
KLAELHGNMFV

SEQ ID NO: 5526 - protein, 9 aa, Homo sapiens
KLAENEITL

SEQ ID NO: 5527 - protein, 9 aa, Homo sapiens
KLAERLWSM

SEQ ID NO: 5528 - protein, 9 aa, Homo sapiens
KLAEVLEAV

SEQ ID NO: 5529 - protein, 9 aa, Homo sapiens
KLAEVSQNI

SEQ ID NO: 5530 - protein, 9 aa, Homo sapiens
KLAEVTKVV

SEQ ID NO: 5531 - protein, 10 aa, Homo sapiens
KLAEVTKVVV

SEQ ID NO: 5532 - protein, 10 aa, Homo sapiens
KLAMLTGVLL

SEQ ID NO: 5533 - protein, 9 aa, Homo sapiens
KLAPPSSTL

SEQ ID NO: 5534 - protein, 9 aa, Homo sapiens
KLAQALHEM

SEQ ID NO: 5535 - protein, 10 aa, Homo sapiens
KLAQANGWGV

SEQ ID NO: 5536 - protein, 9 aa, Homo sapiens
KLAQWLWGL

SEQ ID NO: 5537 - protein, 9 aa, Homo sapiens
KLDDIVQHI

SEQ ID NO: 5538 - protein, 9 aa, Homo sapiens
KLDDTYIKA

SEQ ID NO: 5539 - protein, 9 aa, Homo sapiens
KLDEDVKMI

SEQ ID NO: 5540 - protein, 9 aa, Homo sapiens
KLDEILKEI

SEQ ID NO: 5541 - protein, 9 aa, Homo sapiens
KLDHINMNL

SEQ ID NO: 5542 - protein, 9 aa, Homo sapiens
KLDHTLSQI

SEQ ID NO: 5543 - protein, 9 aa, Homo sapiens
KLDVDAPRL

SEQ ID NO: 5544 - protein, 9 aa, Homo sapiens
KLEEIIHQI

SEQ ID NO: 5545 - protein, 9 aa, Homo sapiens
KLEEQLEKI

SEQ ID NO: 5546 - protein, 9 aa, Artificial Sequence
  unknown
KLENTLQDV

SEQ ID NO: 5547 - protein, 9 aa, Homo sapiens
KLEPHIYAV

SEQ ID NO: 5548 - protein, 8 aa, Homo sapiens
KLESIKEI

SEQ ID NO: 5549 - protein, 9 aa, Homo sapiens
KLFDASHSL

SEQ ID NO: 5550 - protein, 10 aa, Homo sapiens
KLFDIFSQQV

SEQ ID NO: 5551 - protein, 11 aa, Homo sapiens
KLFDLDEKLML

SEQ ID NO: 5552 - protein, 9 aa, Homo sapiens
KLFDNTVGA

SEQ ID NO: 5553 - protein, 9 aa, Homo sapiens
KLFDTQHRV

SEQ ID NO: 5554 - protein, 11 aa, Homo sapiens
KLFEDTKYTTL

SEQ ID NO: 5555 - protein, 9 aa, Homo sapiens
KLFEEIREI

SEQ ID NO: 5556 - protein, 11 aa, Homo sapiens
KLFEEIREILL

SEQ ID NO: 5557 - protein, 9 aa, Homo sapiens
KLFEFMHET

SEQ ID NO: 5558 - protein, 10 aa, Homo sapiens
KLFEGLKFFL

SEQ ID NO: 5559 - protein, 9 aa, Homo sapiens
KLFEKKYSV

SEQ ID NO: 5560 - protein, 10 aa, Homo sapiens
KLFENFLVDI

SEQ ID NO: 5561 - protein, 11 aa, Homo sapiens
KLFGLQEAMKV

SEQ ID NO: 5562 - protein, 9 aa, Homo sapiens
KLFGLVMAL

SEQ ID NO: 5563 - protein, 10 aa, Homo sapiens
KLFLPDGMEA

SEQ ID NO: 5564 - protein, 9 aa, Homo sapiens
KLFLQKINE

SEQ ID NO: 5565 - protein, 9 aa, Homo sapiens
KLFNDAIRL

SEQ ID NO: 5566 - protein, 11 aa, Homo sapiens
KLFNDAIRLAV

SEQ ID NO: 5567 - protein, 9 aa, Homo sapiens
KLFNEFIQL

SEQ ID NO: 5568 - protein, 9 aa, Homo sapiens
KLFPFYFHI

SEQ ID NO: 5569 - protein, 11 aa, Homo sapiens
KLFPGFEIETV

SEQ ID NO: 5570 - protein, 10 aa, Homo sapiens
KLFPQETLFL

SEQ ID NO: 5571 - protein, 10 aa, Homo sapiens
KLFQLPTPPL

SEQ ID NO: 5572 - protein, 10 aa, Homo sapiens
KLFSAKLEQL

SEQ ID NO: 5573 - protein, 9 aa, Homo sapiens
KLFSDLREI

SEQ ID NO: 5574 - protein, 10 aa, Homo sapiens
KLFSGVLMDL

SEQ ID NO: 5575 - protein, 9 aa, Homo sapiens
KLFSLEHFL

SEQ ID NO: 5576 - protein, 9 aa, Homo sapiens
KLGAVFNQV

SEQ ID NO: 5577 - protein, 9 aa, Homo sapiens
KLGDFGLLV

SEQ ID NO: 5578 - protein, 11 aa, Homo sapiens
KLGDFGLLVEL

SEQ ID NO: 5579 - protein, 11 aa, Artificial Sequence
  unidentified
KLKGSPDYLGG

SEQ ID NO: 5580 - protein, 9 aa, Artificial Sequence
  unidentified
LLDDLPPRV

SEQ ID NO: 5581 - protein, 9 aa, Artificial Sequence
  unidentified
LLGGQIATV

SEQ ID NO: 5582 - protein, 9 aa, Artificial Sequence
  unidentified
LLGRVQLVI

SEQ ID NO: 5583 - protein, 11 aa, Artificial Sequence
  unidentified
LLKGGAAASAI

SEQ ID NO: 5584 - protein, 9 aa, Artificial Sequence
  unidentified
LLLQTTVHA

SEQ ID NO: 5585 - protein, 9 aa, Artificial Sequence
  unidentified
LLLTEGTQV

SEQ ID NO: 5586 - protein, 9 aa, Artificial Sequence
  unidentified
LLRGPLLAL

SEQ ID NO: 5587 - protein, 10 aa, Homo sapiens
KLGDFPYVSI

SEQ ID NO: 5588 - protein, 8 aa, Homo sapiens
KLGDIMGV

SEQ ID NO: 5589 - protein, 9 aa, Homo sapiens
KLGDLFFRV

SEQ ID NO: 5590 - protein, 9 aa, Homo sapiens
KLGDLMVLL

SEQ ID NO: 5591 - protein, 9 aa, Homo sapiens
KLGEILANL

SEQ ID NO: 5592 - protein, 8 aa, Homo sapiens
KLGFTVTV

SEQ ID NO: 5593 - protein, 8 aa, Homo sapiens
KLGLAPQI

SEQ ID NO: 5594 - protein, 9 aa, Homo sapiens
KLGPEGELL

SEQ ID NO: 5595 - protein, 8 aa, Homo sapiens
KLGVSIQN

SEQ ID NO: 5596 - protein, 9 aa, Homo sapiens
KLHAVVETL

SEQ ID NO: 5597 - protein, 9 aa, Homo sapiens
KLHDEDLLL

SEQ ID NO: 5598 - protein, 10 aa, Homo sapiens
KLHDFGYRGV

SEQ ID NO: 5599 - protein, 9 aa, Homo sapiens
KLHDINAQM

SEQ ID NO: 5600 - protein, 9 aa, Homo sapiens
KLHDRLAQL

SEQ ID NO: 5601 - protein, 9 aa, Homo sapiens
KLHDSVVMV

SEQ ID NO: 5602 - protein, 10 aa, Homo sapiens
KLHGGIDILV

SEQ ID NO: 5603 - protein, 9 aa, Homo sapiens
KLHLILDYV

SEQ ID NO: 5604 - protein, 9 aa, Homo sapiens
KLHPGLLEV

SEQ ID NO: 5605 - protein, 9 aa, Homo sapiens
KLHRETFYL

SEQ ID NO: 5606 - protein, 9 aa, Homo sapiens
KLHSEDIEL

SEQ ID NO: 5607 - protein, 9 aa, Homo sapiens
KLIAVLESI

SEQ ID NO: 5608 - protein, 9 aa, Homo sapiens
KLIDFSAQI

SEQ ID NO: 5609 - protein, 10 aa, Homo sapiens
KLIDHQGLYL

SEQ ID NO: 5610 - protein, 10 aa, Homo sapiens
KLIDLEHLLF

SEQ ID NO: 5611 - protein, 9 aa, Homo sapiens
KLIDRENFV

SEQ ID NO: 5612 - protein, 9 aa, Homo sapiens
KLIEFLLKA

SEQ ID NO: 5613 - protein, 10 aa, Homo sapiens
KLIEGLPEKV

SEQ ID NO: 5614 - protein, 9 aa, Homo sapiens
KLIEILEQL

SEQ ID NO: 5615 - protein, 9 aa, Homo sapiens
KLIEKNYFL

SEQ ID NO: 5616 - protein, 10 aa, Homo sapiens
KLIETELLQL

SEQ ID NO: 5617 - protein, 11 aa, Homo sapiens
KLIEVDDERKL

SEQ ID NO: 5618 - protein, 10 aa, Homo sapiens
KLIGEELAQL

SEQ ID NO: 5619 - protein, 11 aa, Homo sapiens
KLIHPDEDISL

SEQ ID NO: 5620 - protein, 9 aa, Homo sapiens
KLIIKPDIQ

SEQ ID NO: 5621 - protein, 9 aa, Homo sapiens
KLIKTSPEL

SEQ ID NO: 5622 - protein, 9 aa, Homo sapiens
KLINQVNTI

SEQ ID NO: 5623 - protein, 9 aa, Homo sapiens
KLIQELKTA

SEQ ID NO: 5624 - protein, 9 aa, Homo sapiens
KLIQESPTV

SEQ ID NO: 5625 - protein, 11 aa, Homo sapiens
KLIQESPTVEL

SEQ ID NO: 5626 - protein, 9 aa, Homo sapiens
KLIQFLISL

SEQ ID NO: 5627 - protein, 9 aa, Homo sapiens
KLISSYYNV

SEQ ID NO: 5628 - protein, 11 aa, Homo sapiens
KLISTEVNPKL

SEQ ID NO: 5629 - protein, 10 aa, Homo sapiens
KLITAHVEPL

SEQ ID NO: 5630 - protein, 11 aa, Homo sapiens
KLITLASLLLQ

SEQ ID NO: 5631 - protein, 9 aa, Homo sapiens
KLIVKEYEV

SEQ ID NO: 5632 - protein, 10 aa, Homo sapiens
KLKDDEVAQL

SEQ ID NO: 5633 - protein, 10 aa, Homo sapiens
KLKEHLVFTV

SEQ ID NO: 5634 - protein, 10 aa, Homo sapiens
KLKQNEVANV

SEQ ID NO: 5635 - protein, 9 aa, Homo sapiens
KLKYYIPEV

SEQ ID NO: 5636 - protein, 9 aa, Homo sapiens
KLLAAILHL

SEQ ID NO: 5637 - protein, 9 aa, Homo sapiens
KLLAGFMGV

SEQ ID NO: 5638 - protein, 9 aa, Homo sapiens
KLLAKVEQL

SEQ ID NO: 5639 - protein, 9 aa, Homo sapiens
KLLAQVSKV

SEQ ID NO: 5640 - protein, 10 aa, Homo sapiens
KLLDATHVYM

SEQ ID NO: 5641 - protein, 9 aa, Homo sapiens
KLLDDIKML

SEQ ID NO: 5642 - protein, 10 aa, Homo sapiens
KLLDEAIQAV

SEQ ID NO: 5643 - protein, 11 aa, Homo sapiens
KLLDEDEIRGY

SEQ ID NO: 5644 - protein, 11 aa, Homo sapiens
KLLDEIESLTL

SEQ ID NO: 5645 - protein, 11 aa, Homo sapiens
KLLDELPIAKV

SEQ ID NO: 5646 - protein, 10 aa, Homo sapiens
KLLDERLVTL

SEQ ID NO: 5647 - protein, 11 aa, Homo sapiens
KLLDFGSLSNL

SEQ ID NO: 5648 - protein, 10 aa, Homo sapiens
KLLDFQEFTL

SEQ ID NO: 5649 - protein, 8 aa, Homo sapiens
KLLDISEL

SEQ ID NO: 5650 - protein, 9 aa, Homo sapiens
KLLDKISSV

SEQ ID NO: 5651 - protein, 9 aa, Homo sapiens
KLLDKLLVL

SEQ ID NO: 5652 - protein, 10 aa, Homo sapiens
KLLDKLQTYL

SEQ ID NO: 5653 - protein, 11 aa, Homo sapiens
KLLDLDDKLLM

SEQ ID NO: 5654 - protein, 9 aa, Homo sapiens
KLLDLKKQL

SEQ ID NO: 5655 - protein, 9 aa, Homo sapiens
KLLDMELEM

SEQ ID NO: 5656 - protein, 11 aa, Homo sapiens
KLLDPSTPVHI

SEQ ID NO: 5657 - protein, 9 aa, Homo sapiens
KLLDSMHEV

SEQ ID NO: 5658 - protein, 11 aa, Homo sapiens
KLLDSSTVTHL

SEQ ID NO: 5659 - protein, 11 aa, Homo sapiens
KLLDTMVDTFL

SEQ ID NO: 5660 - protein, 9 aa, Homo sapiens
KLLDTPIKN

SEQ ID NO: 5661 - protein, 10 aa, Homo sapiens
KLLEELSHQL

SEQ ID NO: 5662 - protein, 10 aa, Homo sapiens
KLLEFDQLQL

SEQ ID NO: 5663 - protein, 9 aa, Homo sapiens
KLLEFQLAL

SEQ ID NO: 5664 - protein, 10 aa, Homo sapiens
KLLEGQVIQL

SEQ ID NO: 5665 - protein, 10 aa, Homo sapiens
KLLEGTIVNV

SEQ ID NO: 5666 - protein, 9 aa, Homo sapiens
KLLEIMTRI

SEQ ID NO: 5667 - protein, 11 aa, Homo sapiens
KLLEPDDKLFI

SEQ ID NO: 5668 - protein, 9 aa, Homo sapiens
KLLEQVNRI

SEQ ID NO: 5669 - protein, 9 aa, Homo sapiens
KLLESWLTL

SEQ ID NO: 5670 - protein, 11 aa, Homo sapiens
KLLETELLQEI

SEQ ID NO: 5671 - protein, 10 aa, Homo sapiens
KLLETESFQM

SEQ ID NO: 5672 - protein, 9 aa, Homo sapiens
KLLETMQHL

SEQ ID NO: 5673 - protein, 9 aa, Homo sapiens
KLLEVQILE

SEQ ID NO: 5674 - protein, 10 aa, Homo sapiens
KLLEVQILEV

SEQ ID NO: 5675 - protein, 11 aa, Homo sapiens
KLLEVSDDPQV

SEQ ID NO: 5676 - protein, 9 aa, Homo sapiens
KLLGALLLL

SEQ ID NO: 5677 - protein, 9 aa, Homo sapiens
KLLGKVETA

SEQ ID NO: 5678 - protein, 10 aa, Homo sapiens
KLLGPKINFV

SEQ ID NO: 5679 - protein, 9 aa, Homo sapiens
KLLGTVVAL

SEQ ID NO: 5680 - protein, 9 aa, Homo sapiens
KLLHSENYV

SEQ ID NO: 5681 - protein, 9 aa, Homo sapiens
KLLKYLEAV

SEQ ID NO: 5682 - protein, 9 aa, Homo sapiens
KLLLRLPAL

SEQ ID NO: 5683 - protein, 9 aa, Homo sapiens
KLLLRLPSL

SEQ ID NO: 5684 - protein, 9 aa, Homo sapiens
KLLNHVTQL

SEQ ID NO: 5685 - protein, 9 aa, Homo sapiens
KLLNLISKL

SEQ ID NO: 5686 - protein, 11 aa, Homo sapiens
KLLPDTILEKL

SEQ ID NO: 5687 - protein, 9 aa, Homo sapiens
KLLPETVTI

SEQ ID NO: 5688 - protein, 9 aa, Homo sapiens
KLLPFNPQL

SEQ ID NO: 5689 - protein, 10 aa, Homo sapiens
KLLPLAGLYL

SEQ ID NO: 5690 - protein, 9 aa, Homo sapiens
KLLQDLHEA

SEQ ID NO: 5691 - protein, 10 aa, Homo sapiens
KLLQEHDIEL

SEQ ID NO: 5692 - protein, 9 aa, Homo sapiens
KLLQELYKL

SEQ ID NO: 5693 - protein, 9 aa, Homo sapiens
KLLQESYKL

SEQ ID NO: 5694 - protein, 11 aa, Homo sapiens
KLLQLDKEFQL

SEQ ID NO: 5695 - protein, 8 aa, Homo sapiens
KLLSAVDI

SEQ ID NO: 5696 - protein, 9 aa, Homo sapiens
KLLSEALEL

SEQ ID NO: 5697 - protein, 9 aa, Homo sapiens
KLLSFTHKL

SEQ ID NO: 5698 - protein, 9 aa, Homo sapiens
KLLSRYLTL

SEQ ID NO: 5699 - protein, 9 aa, Homo sapiens
KLLSSVKEI

SEQ ID NO: 5700 - protein, 9 aa, Homo sapiens
KLLVELKVI

SEQ ID NO: 5701 - protein, 10 aa, Homo sapiens
KLLWGDIMEL

SEQ ID NO: 5702 - protein, 10 aa, Homo sapiens
KLMALGPIRL

SEQ ID NO: 5703 - protein, 10 aa, Homo sapiens
KLMDEVIKSM

SEQ ID NO: 5704 - protein, 10 aa, Homo sapiens
KLMDLRNEYL

SEQ ID NO: 5705 - protein, 11 aa, Homo sapiens
KLMDPGSLPPL

SEQ ID NO: 5706 - protein, 9 aa, Homo sapiens
KLMDYIDEL

SEQ ID NO: 5707 - protein, 11 aa, Homo sapiens
KLMDYSLLVGI

SEQ ID NO: 5708 - protein, 9 aa, Homo sapiens
KLMEEIREL

SEQ ID NO: 5709 - protein, 9 aa, Homo sapiens
KLMEKEEKL

SEQ ID NO: 5710 - protein, 9 aa, Homo sapiens
KLMELYERL

SEQ ID NO: 5711 - protein, 10 aa, Homo sapiens
KLMENPPREA

SEQ ID NO: 5712 - protein, 9 aa, Homo sapiens
KLMGVETVV

SEQ ID NO: 5713 - protein, 9 aa, Homo sapiens
KLMKKLLEA

SEQ ID NO: 5714 - protein, 11 aa, Homo sapiens
KLMNDDTLVNV

SEQ ID NO: 5715 - protein, 10 aa, Homo sapiens
KLMNVDPDSV

SEQ ID NO: 5716 - protein, 9 aa, Homo sapiens
KLMPVIMII

SEQ ID NO: 5717 - protein, 9 aa, Homo sapiens
KLMSDLQKL

SEQ ID NO: 5718 - protein, 9 aa, Homo sapiens
KLMSEVQTL

SEQ ID NO: 5719 - protein, 10 aa, Homo sapiens
KLMSLGDIRL

SEQ ID NO: 5720 - protein, 9 aa, Homo sapiens
KLNAKLAEL

SEQ ID NO: 5721 - protein, 9 aa, Homo sapiens
KLNDLIQRL

SEQ ID NO: 5722 - protein, 9 aa, Homo sapiens
KLNEVYEAV

SEQ ID NO: 5723 - protein, 9 aa, Homo sapiens
KLNNFNSYL

SEQ ID NO: 5724 - protein, 10 aa, Homo sapiens
KLNPAANHRL

SEQ ID NO: 5725 - protein, 9 aa, Homo sapiens
KLNSWIQGV

SEQ ID NO: 5726 - protein, 9 aa, Homo sapiens
KLPDGTWNL

SEQ ID NO: 5727 - protein, 8 aa, Homo sapiens
KLPIAPLI

SEQ ID NO: 5728 - protein, 11 aa, Homo sapiens
KLPSETIFVGC

SEQ ID NO: 5729 - protein, 9 aa, Homo sapiens
KLPSFLANV

SEQ ID NO: 5730 - protein, 9 aa, Homo sapiens
KLQAQDPQI

SEQ ID NO: 5731 - protein, 9 aa, Homo sapiens
KLQDASAEV

SEQ ID NO: 5732 - protein, 9 aa, Homo sapiens
KLQDELKLL

SEQ ID NO: 5733 - protein, 9 aa, Homo sapiens
KLQDGLLHI

SEQ ID NO: 5734 - protein, 9 aa, Homo sapiens
KLQDLIEEI

SEQ ID NO: 5735 - protein, 9 aa, Homo sapiens
KLQDNLRQL

SEQ ID NO: 5736 - protein, 9 aa, Homo sapiens
KLQEANAQL

SEQ ID NO: 5737 - protein, 9 aa, Homo sapiens
KLQEEIEKI

SEQ ID NO: 5738 - protein, 9 aa, Homo sapiens
KLQEELERL

SEQ ID NO: 5739 - protein, 11 aa, Homo sapiens
KLQEEVKDLRA

SEQ ID NO: 5740 - protein, 10 aa, Homo sapiens
KLQEFELPYV

SEQ ID NO: 5741 - protein, 9 aa, Homo sapiens
KLQEIENAI

SEQ ID NO: 5742 - protein, 9 aa, Homo sapiens
KLQEKLDEL

SEQ ID NO: 5743 - protein, 9 aa, Homo sapiens
KLQEKVELL

SEQ ID NO: 5744 - protein, 9 aa, Homo sapiens
KLQEQLAQL

SEQ ID NO: 5745 - protein, 10 aa, Homo sapiens
KLQEQLEATV

SEQ ID NO: 5746 - protein, 9 aa, Homo sapiens
KLQEQLPEL

SEQ ID NO: 5747 - protein, 11 aa, Homo sapiens
KLQEVHPLLTL

SEQ ID NO: 5748 - protein, 9 aa, Homo sapiens
KLQEVLDYL

SEQ ID NO: 5749 - protein, 9 aa, Homo sapiens
KLQGKLPEL

SEQ ID NO: 5750 - protein, 9 aa, Homo sapiens
KLQKLLILL

SEQ ID NO: 5751 - protein, 9 aa, Homo sapiens
KLQLLLEEL

SEQ ID NO: 5752 - protein, 11 aa, Homo sapiens
KLQPTPGIQKV

SEQ ID NO: 5753 - protein, 9 aa, Homo sapiens
KLQQKVDEL

SEQ ID NO: 5754 - protein, 9 aa, Homo sapiens
KLQQLFIQL

SEQ ID NO: 5755 - protein, 9 aa, Homo sapiens
KLQQTLEEV

SEQ ID NO: 5756 - protein, 9 aa, Homo sapiens
KLRDSLELL

SEQ ID NO: 5757 - protein, 9 aa, Homo sapiens
KLRELVETL

SEQ ID NO: 5758 - protein, 9 aa, Homo sapiens
KLRSELEMV

SEQ ID NO: 5759 - protein, 9 aa, Homo sapiens
KLSDNILKL

SEQ ID NO: 5760 - protein, 9 aa, Homo sapiens
KLSDTLHSL

SEQ ID NO: 5761 - protein, 9 aa, Homo sapiens
KLSDVWKEL

SEQ ID NO: 5762 - protein, 9 aa, Homo sapiens
KLSDYEPKV

SEQ ID NO: 5763 - protein, 9 aa, Homo sapiens
KLSEEIMEI

SEQ ID NO: 5764 - protein, 11 aa, Homo sapiens
KLSEELSGGRL

SEQ ID NO: 5765 - protein, 9 aa, Homo sapiens
KLSEFDVEM

SEQ ID NO: 5766 - protein, 9 aa, Homo sapiens
KLSELQLRV

SEQ ID NO: 5767 - protein, 10 aa, Homo sapiens
KLSEQGLKEV

SEQ ID NO: 5768 - protein, 9 aa, Homo sapiens
KLSESQLEL

SEQ ID NO: 5769 - protein, 10 aa, Homo sapiens
KLSETHGYGV

SEQ ID NO: 5770 - protein, 9 aa, Homo sapiens
KLSEVAEAI

SEQ ID NO: 5771 - protein, 9 aa, Homo sapiens
KLSEVNKRL

SEQ ID NO: 5772 - protein, 9 aa, Homo sapiens
KLSEYEMSI

SEQ ID NO: 5773 - protein, 9 aa, Homo sapiens
KLSQVLNEL

SEQ ID NO: 5774 - protein, 9 aa, Homo sapiens
KLSQYLIQL

SEQ ID NO: 5775 - protein, 9 aa, Homo sapiens
KLSSLIILM

SEQ ID NO: 5776 - protein, 9 aa, Homo sapiens
KLTAATFTV

SEQ ID NO: 5777 - protein, 9 aa, Homo sapiens
KLTDFLPKL

SEQ ID NO: 5778 - protein, 10 aa, Homo sapiens
KLTDHGLEEI

SEQ ID NO: 5779 - protein, 10 aa, Homo sapiens
KLTDVGIATL

SEQ ID NO: 5780 - protein, 9 aa, Homo sapiens
KLTEGQYVL

SEQ ID NO: 5781 - protein, 9 aa, Homo sapiens
KLTEILELL

SEQ ID NO: 5782 - protein, 10 aa, Homo sapiens
KLTEMRGIYA

SEQ ID NO: 5783 - protein, 9 aa, Homo sapiens
KLTENLVAL

SEQ ID NO: 5784 - protein, 9 aa, Homo sapiens
KLTEVHEEL

SEQ ID NO: 5785 - protein, 9 aa, Homo sapiens
KLTEYVDKV

SEQ ID NO: 5786 - protein, 9 aa, Homo sapiens
KLTGILQEV

SEQ ID NO: 5787 - protein, 9 aa, Homo sapiens
KLTPLSHEV

SEQ ID NO: 5788 - protein, 9 aa, Homo sapiens
KLTVVLEAV

SEQ ID NO: 5789 - protein, 9 aa, Homo sapiens
KLVAHLEMI

SEQ ID NO: 5790 - protein, 9 aa, Homo sapiens
KLVDFVIHF

SEQ ID NO: 5791 - protein, 11 aa, Homo sapiens
KLVDPERDMSL

SEQ ID NO: 5792 - protein, 9 aa, Homo sapiens
KLVDPLYSI

SEQ ID NO: 5793 - protein, 9 aa, Homo sapiens
KLVDRTWTL

SEQ ID NO: 5794 - protein, 11 aa, Homo sapiens
KLVEIPTKMRV

SEQ ID NO: 5795 - protein, 9 aa, Homo sapiens
KLVGEFLEV

SEQ ID NO: 5796 - protein, 9 aa, Homo sapiens
KLVGMSVLL

SEQ ID NO: 5797 - protein, 9 aa, Homo sapiens
KLVHILNMV

SEQ ID NO: 5798 - protein, 9 aa, Homo sapiens
KLVNILVQL

SEQ ID NO: 5799 - protein, 9 aa, Homo sapiens
KLVNKVIEL

SEQ ID NO: 5800 - protein, 9 aa, Homo sapiens
KLVPFLKKV

SEQ ID NO: 5801 - protein, 9 aa, Homo sapiens
KLVPQLVRI

SEQ ID NO: 5802 - protein, 10 aa, Homo sapiens
KLVQEALEAV

SEQ ID NO: 5803 - protein, 9 aa, Homo sapiens
KLVQIEYAL

SEQ ID NO: 5804 - protein, 9 aa, Homo sapiens
KLVQILHRL

SEQ ID NO: 5805 - protein, 9 aa, Homo sapiens
KLVSLMVLL

SEQ ID NO: 5806 - protein, 9 aa, Homo sapiens
KLWADRISL

SEQ ID NO: 5807 - protein, 10 aa, Homo sapiens
KLWDEVLSHL

SEQ ID NO: 5808 - protein, 8 aa, Homo sapiens
KLWDINAH

SEQ ID NO: 5809 - protein, 9 aa, Homo sapiens
KLWDINAHI

SEQ ID NO: 5810 - protein, 11 aa, Homo sapiens
KLWDLEQQVKA

SEQ ID NO: 5811 - protein, 8 aa, Homo sapiens
KLWDVREG

SEQ ID NO: 5812 - protein, 10 aa, Homo sapiens
KLWEFFQVDV

SEQ ID NO: 5813 - protein, 11 aa, Homo sapiens
KLWEFPINNEA

SEQ ID NO: 5814 - protein, 11 aa, Homo sapiens
KLWEIPSLAYL

SEQ ID NO: 5815 - protein, 9 aa, Homo sapiens
KLWELLYKL

SEQ ID NO: 5816 - protein, 9 aa, Homo sapiens
KLWESPNVL

SEQ ID NO: 5817 - protein, 9 aa, Homo sapiens
KLWPLFVKL

SEQ ID NO: 5818 - protein, 11 aa, Homo sapiens
KLWTGGLDNTV

SEQ ID NO: 5819 - protein, 10 aa, Homo sapiens
KLWVGPVPMV

SEQ ID NO: 5820 - protein, 9 aa, Homo sapiens
KLYALDVLL

SEQ ID NO: 5821 - protein, 9 aa, Homo sapiens
KLYDDMIRL

SEQ ID NO: 5822 - protein, 10 aa, Homo sapiens
KLYEKLLTAV

SEQ ID NO: 5823 - protein, 9 aa, Homo sapiens
KLYELYLQL

SEQ ID NO: 5824 - protein, 9 aa, Homo sapiens
KLYESELTL

SEQ ID NO: 5825 - protein, 10 aa, Homo sapiens
KLYHQWLSTV

SEQ ID NO: 5826 - protein, 9 aa, Homo sapiens
KLYNIWIRL

SEQ ID NO: 5827 - protein, 9 aa, Homo sapiens
KLYNKELYA

SEQ ID NO: 5828 - protein, 9 aa, Homo sapiens
KLYPQLSSV

SEQ ID NO: 5829 - protein, 11 aa, Homo sapiens
KLYQEVEIASV

SEQ ID NO: 5830 - protein, 10 aa, Homo sapiens
KLYSSSGPEL

SEQ ID NO: 5831 - protein, 9 aa, Homo sapiens
KLYSVVSQL

SEQ ID NO: 5832 - protein, 10 aa, Homo sapiens
KLYTGLEYDL

SEQ ID NO: 5833 - protein, 9 aa, Homo sapiens
KMAPPPKEV

SEQ ID NO: 5834 - protein, 9 aa, Homo sapiens
KMFEFYERV

SEQ ID NO: 5835 - protein, 10 aa, Homo sapiens
KMFESFIESV

SEQ ID NO: 5836 - protein, 10 aa, Homo sapiens
KMHDYDGNNL

SEQ ID NO: 5837 - protein, 10 aa, Homo sapiens
KMISMDIEQV

SEQ ID NO: 5838 - protein, 11 aa, Homo sapiens
KMKQELEAEYL

SEQ ID NO: 5839 - protein, 10 aa, Homo sapiens
KMLDEILLQL

SEQ ID NO: 5840 - protein, 11 aa, Homo sapiens
KMLDHPHIIKL

SEQ ID NO: 5841 - protein, 10 aa, Homo sapiens
KMLEIDPQKV

SEQ ID NO: 5842 - protein, 9 aa, Homo sapiens
KMVSIQITL

SEQ ID NO: 5843 - protein, 11 aa, Homo sapiens
KMYEKIDLTLL

SEQ ID NO: 5844 - protein, 9 aa, Homo sapiens
KQFEGTVEI

SEQ ID NO: 5845 - protein, 9 aa, Homo sapiens
KQISTLESV

SEQ ID NO: 5846 - protein, 9 aa, Homo sapiens
KQLNHFWEI

SEQ ID NO: 5847 - protein, 9 aa, Homo sapiens
KQTDLEITV

SEQ ID NO: 5848 - protein, 9 aa, Homo sapiens
KQTDVAAEV

SEQ ID NO: 5849 - protein, 9 aa, Homo sapiens
KVADLVLML

SEQ ID NO: 5850 - protein, 9 aa, Homo sapiens
KVADTILFL

SEQ ID NO: 5851 - protein, 9 aa, Homo sapiens
KVASLLHQV

SEQ ID NO: 5852 - protein, 10 aa, Homo sapiens
KVFSGALQEA

SEQ ID NO: 5853 - protein, 9 aa, Homo sapiens
KVHEYNVLL

SEQ ID NO: 5854 - protein, 9 aa, Homo sapiens
KVLDVLWEL

SEQ ID NO: 5855 - protein, 9 aa, Homo sapiens
KVLGKIEKV

SEQ ID NO: 5856 - protein, 9 aa, Homo sapiens
KVLSKEFHL

SEQ ID NO: 5857 - protein, 9 aa, Homo sapiens
KVMGFGLYL

SEQ ID NO: 5858 - protein, 9 aa, Homo sapiens
KVQEQIFNL

SEQ ID NO: 5859 - protein, 11 aa, Homo sapiens
KVSEEAKSILL

SEQ ID NO: 5860 - protein, 9 aa, Homo sapiens
KYPHYFPLL

SEQ ID NO: 5861 - protein, 8 aa, Homo sapiens
LDKKVEKV

SEQ ID NO: 5862 - protein, 9 aa, Adeno-associated virus - 2
LIDQYLYYL

SEQ ID NO: 5863 - protein, 9 aa, Homo sapiens
LIDTSRHYL

SEQ ID NO: 5864 - protein, 9 aa, Homo sapiens
LIHKVWMEL

SEQ ID NO: 5865 - protein, 8 aa, Homo sapiens
LIQKLILL

SEQ ID NO: 5866 - protein, 8 aa, Homo sapiens
LIQSLVSI

SEQ ID NO: 5867 - protein, 9 aa, Homo sapiens
LIYSGKLLL

SEQ ID NO: 5868 - protein, 9 aa, Homo sapiens
LLADELITV

SEQ ID NO: 5869 - protein, 9 aa, Homo sapiens
LLADHTVHV

SEQ ID NO: 5870 - protein, 9 aa, Homo sapiens
LLADVETFV

SEQ ID NO: 5871 - protein, 10 aa, Homo sapiens
LLAEDDELHL

SEQ ID NO: 5872 - protein, 10 aa, Homo sapiens
LLAEIGAVTL

SEQ ID NO: 5873 - protein, 11 aa, Homo sapiens
LLAEIGAVTLV

SEQ ID NO: 5874 - protein, 9 aa, Homo sapiens
LLAEKVEEI

SEQ ID NO: 5875 - protein, 9 aa, Homo sapiens
LLAELLTHL

SEQ ID NO: 5876 - protein, 9 aa, Homo sapiens
LLAELPASV

SEQ ID NO: 5877 - protein, 11 aa, Homo sapiens
LLAELPASVHA

SEQ ID NO: 5878 - protein, 10 aa, Homo sapiens
LLAELREYNL

SEQ ID NO: 5879 - protein, 9 aa, Homo sapiens
LLAERDLYL

SEQ ID NO: 5880 - protein, 9 aa, Homo sapiens
LLAESVTEV

SEQ ID NO: 5881 - protein, 9 aa, Homo sapiens
LLAEVIENL

SEQ ID NO: 5882 - protein, 9 aa, Homo sapiens
LLAGLHVLL

SEQ ID NO: 5883 - protein, 9 aa, Homo sapiens
LLANTAAHI

SEQ ID NO: 5884 - protein, 9 aa, Homo sapiens
LLAPAPAQA

SEQ ID NO: 5885 - protein, 9 aa, Homo sapiens
LLAPPPPSA

SEQ ID NO: 5886 - protein, 11 aa, Homo sapiens
LLAPTPYIIGV

SEQ ID NO: 5887 - protein, 9 aa, Homo sapiens
LLAQGVAAA

SEQ ID NO: 5888 - protein, 9 aa, Homo sapiens
LLASKAVGV

SEQ ID NO: 5889 - protein, 9 aa, Homo sapiens
LLASYVHYV

SEQ ID NO: 5890 - protein, 9 aa, Homo sapiens
LLATEVVTV

SEQ ID NO: 5891 - protein, 9 aa, Homo sapiens
LLAVPVPGV

SEQ ID NO: 5892 - protein, 11 aa, Homo sapiens
LLCRPPPGALP

SEQ ID NO: 5893 - protein, 10 aa, Homo sapiens
LLDANLNIKI

SEQ ID NO: 5894 - protein, 10 aa, Homo sapiens
LLDDSLLPLA

SEQ ID NO: 5895 - protein, 9 aa, Homo sapiens
LLDDSLVSI

SEQ ID NO: 5896 - protein, 9 aa, Homo sapiens
LLDDTTVTL

SEQ ID NO: 5897 - protein, 9 aa, Homo sapiens
LLDEAIQAV

SEQ ID NO: 5898 - protein, 11 aa, Homo sapiens
LLDEFTTKLLA

SEQ ID NO: 5899 - protein, 10 aa, Homo sapiens
LLDEHGHVRI

SEQ ID NO: 5900 - protein, 11 aa, Homo sapiens
LLDEIENIKQV

SEQ ID NO: 5901 - protein, 9 aa, Homo sapiens
LLDELPQSV

SEQ ID NO: 5902 - protein, 9 aa, Homo sapiens
LLDERLVTL

SEQ ID NO: 5903 - protein, 9 aa, Homo sapiens
LLDLHSYLL

SEQ ID NO: 5904 - protein, 10 aa, Homo sapiens
LLDLIGAPNP

SEQ ID NO: 5905 - protein, 10 aa, Homo sapiens
LLDLLGAPNP

SEQ ID NO: 5906 - protein, 9 aa, Homo sapiens
LLDLRPSIL

SEQ ID NO: 5907 - protein, 9 aa, Homo sapiens
LLDNTDIHL

SEQ ID NO: 5908 - protein, 9 aa, Homo sapiens
LLDPTNPSA

SEQ ID NO: 5909 - protein, 9 aa, Homo sapiens
LLDPTNVFI

SEQ ID NO: 5910 - protein, 10 aa, Homo sapiens
LLDPVPPVLV

SEQ ID NO: 5911 - protein, 9 aa, Homo sapiens
LLDSIQLLP

SEQ ID NO: 5912 - protein, 10 aa, Homo sapiens
LLDSPGKVLL

SEQ ID NO: 5913 - protein, 9 aa, Homo sapiens
LLDTVTMQV

SEQ ID NO: 5914 - protein, 9 aa, Homo sapiens
LLEEINHFL

SEQ ID NO: 5915 - protein, 9 aa, Homo sapiens
LLELGDSLM

SEQ ID NO: 5916 - protein, 9 aa, Homo sapiens
LLETHSHFL

SEQ ID NO: 5917 - protein, 9 aa, Homo sapiens
LLFDEYHKL

SEQ ID NO: 5918 - protein, 11 aa, Homo sapiens
LLFDHLEPIEL

SEQ ID NO: 5919 - protein, 9 aa, Homo sapiens
LLFDVHTTL

SEQ ID NO: 5920 - protein, 11 aa, Homo sapiens
LLFEGEKKITI

SEQ ID NO: 5921 - protein, 10 aa, Homo sapiens
LLFGGSLARI

SEQ ID NO: 5922 - protein, 11 aa, Homo sapiens
LLFHHPNILEL

SEQ ID NO: 5923 - protein, 9 aa, Homo sapiens
LLFKEGVMV

SEQ ID NO: 5924 - protein, 11 aa, Homo sapiens
LLFPQIEGIKI

SEQ ID NO: 5925 - protein, 9 aa, Homo sapiens
LLGDLLFHI

SEQ ID NO: 5926 - protein, 9 aa, Homo sapiens
LLGEDQLVL

SEQ ID NO: 5927 - protein, 9 aa, Homo sapiens
LLGPKPFPL

SEQ ID NO: 5928 - protein, 9 aa, Homo sapiens
LLGSVVHEV

SEQ ID NO: 5929 - protein, 9 aa, Homo sapiens
LLGTLPIGA

SEQ ID NO: 5930 - protein, 9 aa, Homo sapiens
LLHDGIPVV

SEQ ID NO: 5931 - protein, 9 aa, Homo sapiens
LLHDKLFGL

SEQ ID NO: 5932 - protein, 9 aa, Homo sapiens
LLHDQIEKL

SEQ ID NO: 5933 - protein, 9 aa, Homo sapiens
LLHEKLYEL

SEQ ID NO: 5934 - protein, 9 aa, Homo sapiens
LLIDHRFLL

SEQ ID NO: 5935 - protein, 11 aa, Homo sapiens
LLIENVQRINV

SEQ ID NO: 5936 - protein, 11 aa, Homo sapiens
LLIGHLERVTV

SEQ ID NO: 5937 - protein, 10 aa, Homo sapiens
LLIIVIASSL

SEQ ID NO: 5938 - protein, 9 aa, Homo sapiens
LLIKLPELN

SEQ ID NO: 5939 - protein, 11 aa, Homo sapiens
LLINERGELKL

SEQ ID NO: 5940 - protein, 10 aa, Homo sapiens
LLINLVEYSA

SEQ ID NO: 5941 - protein, 9 aa, Homo sapiens
LLINSVFHV

SEQ ID NO: 5942 - protein, 9 aa, Homo sapiens
LLIPIHLEV

SEQ ID NO: 5943 - protein, 9 aa, Homo sapiens
LLIQTVEKA

SEQ ID NO: 5944 - protein, 9 aa, Homo sapiens
LLKDSIVQL

SEQ ID NO: 5945 - protein, 10 aa, Homo sapiens
LLKEGEEPTV

SEQ ID NO: 5946 - protein, 9 aa, Homo sapiens
LLKLAEETN

SEQ ID NO: 5947 - protein, 9 aa, Homo sapiens
LLKNLENLV

SEQ ID NO: 5948 - protein, 9 aa, Homo sapiens
LLKPDLILL

SEQ ID NO: 5949 - protein, 10 aa, Homo sapiens
LLKVVDLGNA

SEQ ID NO: 5950 - protein, 11 aa, Homo sapiens
LLLAHGADPTL

SEQ ID NO: 5951 - protein, 9 aa, Homo sapiens
LLLAHIIAL

SEQ ID NO: 5952 - protein, 9 aa, Homo sapiens
LLLAIIPHV

SEQ ID NO: 5953 - protein, 9 aa, Homo sapiens
LLLANTAAH

SEQ ID NO: 5954 - protein, 8 aa, Homo sapiens
LLLANVVV

SEQ ID NO: 5955 - protein, 11 aa, Homo sapiens
LLLASKQLGSP

SEQ ID NO: 5956 - protein, 9 aa, Homo sapiens
LLLDAKLLV

SEQ ID NO: 5957 - protein, 11 aa, Homo sapiens
LLLDENGVLKL

SEQ ID NO: 5958 - protein, 11 aa, Homo sapiens
LLLDGNMDIKL

SEQ ID NO: 5959 - protein, 9 aa, Homo sapiens
LLLDKLILL

SEQ ID NO: 5960 - protein, 9 aa, Homo sapiens
LLLDKPETV

SEQ ID NO: 5961 - protein, 10 aa, Homo sapiens
LLLDLGHLKV

SEQ ID NO: 5962 - protein, 10 aa, Homo sapiens
LLLDTVTMQV

SEQ ID NO: 5963 - protein, 9 aa, Homo sapiens
LLLEAVWHL

SEQ ID NO: 5964 - protein, 11 aa, Homo sapiens
LLLEEGGLVQV

SEQ ID NO: 5965 - protein, 9 aa, Homo sapiens
LLLESDPKV

SEQ ID NO: 5966 - protein, 9 aa, Homo sapiens
LLLEVVKQV

SEQ ID NO: 5967 - protein, 9 aa, Homo sapiens
LLLGQLVEV

SEQ ID NO: 5968 - protein, 9 aa, Homo sapiens
LLLKSLTYV

SEQ ID NO: 5969 - protein, 9 aa, Homo sapiens
LLLKYTEKL

SEQ ID NO: 5970 - protein, 9 aa, Homo sapiens
LLLLAHIIA

SEQ ID NO: 5971 - protein, 11 aa, Homo sapiens
LLLLDTVTMQV

SEQ ID NO: 5972 - protein, 10 aa, Homo sapiens
LLLLLQSCMS

SEQ ID NO: 5973 - protein, 9 aa, Homo sapiens
LLLNEDPLN

SEQ ID NO: 5974 - protein, 11 aa, Homo sapiens
LLLNEEALAQI

SEQ ID NO: 5975 - protein, 9 aa, Homo sapiens
LLLNYAVRL

SEQ ID NO: 5976 - protein, 9 aa, Homo sapiens
LLLPDAPLV

SEQ ID NO: 5977 - protein, 11 aa, Homo sapiens
LLLPDQPPYHL

SEQ ID NO: 5978 - protein, 9 aa, Homo sapiens
LLLPGSHYL

SEQ ID NO: 5979 - protein, 10 aa, Homo sapiens
LLLPGVIKTV

SEQ ID NO: 5980 - protein, 9 aa, Homo sapiens
LLLPLPLLL

SEQ ID NO: 5981 - protein, 9 aa, Homo sapiens
LLLQKETEL

SEQ ID NO: 5982 - protein, 9 aa, Homo sapiens
LLLSDLPGV

SEQ ID NO: 5983 - protein, 9 aa, Homo sapiens
LLLSGGLAL

SEQ ID NO: 5984 - protein, 9 aa, Homo sapiens
LLLSHLPLL

SEQ ID NO: 5985 - protein, 9 aa, Homo sapiens
LLLTENGIL

SEQ ID NO: 5986 - protein, 9 aa, Homo sapiens
LLLTKPTEA

SEQ ID NO: 5987 - protein, 9 aa, Homo sapiens
LLLTQRLPV

SEQ ID NO: 5988 - protein, 9 aa, Homo sapiens
LLLTTIPQI

SEQ ID NO: 5989 - protein, 9 aa, Homo sapiens
LLMDMLEKL

SEQ ID NO: 5990 - protein, 9 aa, Homo sapiens
LLMENAERV

SEQ ID NO: 5991 - protein, 10 aa, Homo sapiens
LLMIIGALTL

SEQ ID NO: 5992 - protein, 11 aa, Homo sapiens
LLMPIPEGLTL

SEQ ID NO: 5993 - protein, 11 aa, Homo sapiens
LLMPSSEDLLL

SEQ ID NO: 5994 - protein, 11 aa, Homo sapiens
LLMQPLSSIHV

SEQ ID NO: 5995 - protein, 9 aa, Homo sapiens
LLMQQVHTI

SEQ ID NO: 5996 - protein, 9 aa, Homo sapiens
LLMTDTHML

SEQ ID NO: 5997 - protein, 9 aa, Homo sapiens
LLNDHIYVV

SEQ ID NO: 5998 - protein, 9 aa, Homo sapiens
LLNDRKVFV

SEQ ID NO: 5999 - protein, 9 aa, Homo sapiens
LLNLAIVHA

SEQ ID NO: 6000 - protein, 8 aa, Homo sapiens
LLNSGVYL

SEQ ID NO: 6001 - protein, 9 aa, Homo sapiens
LLNSLFLIL

SEQ ID NO: 6002 - protein, 9 aa, Homo sapiens
LLNVEPAGA

SEQ ID NO: 6003 - protein, 10 aa, Homo sapiens
LLPDYYLVTV

SEQ ID NO: 6004 - protein, 9 aa, Homo sapiens
LLPEIMPGL

SEQ ID NO: 6005 - protein, 10 aa, Homo sapiens
LLPELRDWGV

SEQ ID NO: 6006 - protein, 9 aa, Homo sapiens
LLPEYLPYA

SEQ ID NO: 6007 - protein, 9 aa, Homo sapiens
LLPHILPLL

SEQ ID NO: 6008 - protein, 9 aa, Homo sapiens
LLPLKLLQL

SEQ ID NO: 6009 - protein, 9 aa, Homo sapiens
LLPPAPPHA

SEQ ID NO: 6010 - protein, 9 aa, Homo sapiens
LLPPAPPSV

SEQ ID NO: 6011 - protein, 9 aa, Homo sapiens
LLPPPPTSA

SEQ ID NO: 6012 - protein, 9 aa, Homo sapiens
LLQDGLKDL

SEQ ID NO: 6013 - protein, 9 aa, Homo sapiens
LLQDHPWLL

SEQ ID NO: 6014 - protein, 11 aa, Homo sapiens
LLQDIKLLENV

SEQ ID NO: 6015 - protein, 9 aa, Homo sapiens
LLQDRLVSV

SEQ ID NO: 6016 - protein, 10 aa, Homo sapiens
LLQEAGIKTA

SEQ ID NO: 6017 - protein, 9 aa, Homo sapiens
LLQEDLVHI

SEQ ID NO: 6018 - protein, 9 aa, Homo sapiens
LLQEHDIEL

SEQ ID NO: 6019 - protein, 9 aa, Homo sapiens
LLQESLAQA

SEQ ID NO: 6020 - protein, 9 aa, Homo sapiens
LLQGAELLL

SEQ ID NO: 6021 - protein, 8 aa, Homo sapiens
LLQHVLLL

SEQ ID NO: 6022 - protein, 9 aa, Homo sapiens
LLQLLKDNV

SEQ ID NO: 6023 - protein, 11 aa, Homo sapiens
LLQNGADPQLL

SEQ ID NO: 6024 - protein, 9 aa, Homo sapiens
LLQNNLPAV

SEQ ID NO: 6025 - protein, 11 aa, Homo sapiens
LLQPFADAMKL

SEQ ID NO: 6026 - protein, 9 aa, Homo sapiens
LLQPQPPLL

SEQ ID NO: 6027 - protein, 9 aa, Homo sapiens
LLRAAPLLL

SEQ ID NO: 6028 - protein, 9 aa, Homo sapiens
LLRAPGAEL

SEQ ID NO: 6029 - protein, 9 aa, Homo sapiens
LLRDGIELV

SEQ ID NO: 6030 - protein, 9 aa, Homo sapiens
LLREKVEFL

SEQ ID NO: 6031 - protein, 10 aa, Homo sapiens
LLSAAEPVPA

SEQ ID NO: 6032 - protein, 11 aa, Homo sapiens
LLSDLGSDIFA

SEQ ID NO: 6033 - protein, 8 aa, Homo sapiens
LLSDLHAF

SEQ ID NO: 6034 - protein, 9 aa, Homo sapiens
LLSDTKLEL

SEQ ID NO: 6035 - protein, 9 aa, Homo sapiens
LLSEIEEHL

SEQ ID NO: 6036 - protein, 9 aa, Homo sapiens
LLSEILHLL

SEQ ID NO: 6037 - protein, 9 aa, Homo sapiens
LLSELLEHL

SEQ ID NO: 6038 - protein, 11 aa, Homo sapiens
LLSEPSLLRTV

SEQ ID NO: 6039 - protein, 9 aa, Homo sapiens
LLSERFINV

SEQ ID NO: 6040 - protein, 9 aa, Homo sapiens
LLSESNERL

SEQ ID NO: 6041 - protein, 9 aa, Homo sapiens
LLSEVLAHL

SEQ ID NO: 6042 - protein, 10 aa, Homo sapiens
LLSHAGILKV

SEQ ID NO: 6043 - protein, 9 aa, Homo sapiens
LLSKVLIYL

SEQ ID NO: 6044 - protein, 10 aa, Homo sapiens
LLSLGGAIEI

SEQ ID NO: 6045 - protein, 8 aa, Homo sapiens
LLSLIRNW

SEQ ID NO: 6046 - protein, 9 aa, Homo sapiens
LLSNNNQAL

SEQ ID NO: 6047 - protein, 9 aa, Homo sapiens
LLSNWYHFL

SEQ ID NO: 6048 - protein, 11 aa, Homo sapiens
LLSPGGPGSTL

SEQ ID NO: 6049 - protein, 9 aa, Homo sapiens
LLSPHNPAL

SEQ ID NO: 6050 - protein, 9 aa, Homo sapiens
LLSQAQYHV

SEQ ID NO: 6051 - protein, 9 aa, Homo sapiens
LLSTLHLLV

SEQ ID NO: 6052 - protein, 9 aa, Homo sapiens
LLTDIKVKL

SEQ ID NO: 6053 - protein, 9 aa, Homo sapiens
LLTDILADV

SEQ ID NO: 6054 - protein, 9 aa, Homo sapiens
LLTDYILKV

SEQ ID NO: 6055 - protein, 9 aa, Homo sapiens
LLTEIRAVV

SEQ ID NO: 6056 - protein, 9 aa, Homo sapiens
LLTEQIHSL

SEQ ID NO: 6057 - protein, 9 aa, Homo sapiens
LLTKDLPAI

SEQ ID NO: 6058 - protein, 9 aa, Homo sapiens
LLTNVLETL

SEQ ID NO: 6059 - protein, 9 aa, Homo sapiens
LLVDEFLKV

SEQ ID NO: 6060 - protein, 11 aa, Homo sapiens
LLVDERSVAHV

SEQ ID NO: 6061 - protein, 9 aa, Homo sapiens
LLVDKEFKI

SEQ ID NO: 6062 - protein, 9 aa, Homo sapiens
LLVGFPLTV

SEQ ID NO: 6063 - protein, 9 aa, Homo sapiens
LLVGFVHYL

SEQ ID NO: 6064 - protein, 9 aa, Homo sapiens
LLVKYGADI

SEQ ID NO: 6065 - protein, 11 aa, Homo sapiens
LLVLSALPALL

SEQ ID NO: 6066 - protein, 9 aa, Homo sapiens
LLVNTLYTV

SEQ ID NO: 6067 - protein, 9 aa, Homo sapiens
LLWAGPVNA

SEQ ID NO: 6068 - protein, 9 aa, Homo sapiens
LLWDKIHKL

SEQ ID NO: 6069 - protein, 10 aa, Homo sapiens
LLWDVPAPSL

SEQ ID NO: 6070 - protein, 11 aa, Homo sapiens
LLWSPPDHMYL

SEQ ID NO: 6071 - protein, 9 aa, Homo sapiens
LLWWLQPRL

SEQ ID NO: 6072 - protein, 9 aa, Homo sapiens
LLYDQPLQV

SEQ ID NO: 6073 - protein, 10 aa, Homo sapiens
LLYEDIPDKV

SEQ ID NO: 6074 - protein, 10 aa, Homo sapiens
LLYEEGLRVV

SEQ ID NO: 6075 - protein, 9 aa, Homo sapiens
LLYEHQNNL

SEQ ID NO: 6076 - protein, 10 aa, Homo sapiens
LLYGGDLHSA

SEQ ID NO: 6077 - protein, 9 aa, Homo sapiens
LLYLLTHYL

SEQ ID NO: 6078 - protein, 10 aa, Homo sapiens
LLYNSTDPTL

SEQ ID NO: 6079 - protein, 9 aa, Homo sapiens
LMGPVVHEV

SEQ ID NO: 6080 - protein, 9 aa, Homo sapiens
LMNAVVQTV

SEQ ID NO: 6081 - protein, 9 aa, Homo sapiens
LMTDVLVFL

SEQ ID NO: 6082 - protein, 10 aa, Homo sapiens
LQDYIILPTI

SEQ ID NO: 6083 - protein, 9 aa, Homo sapiens
LQHEGIFRV

SEQ ID NO: 6084 - protein, 9 aa, Artificial Sequence
  unidentified
LTINKIYVI

SEQ ID NO: 6085 - protein, 8 aa, Artificial Sequence
  unidentified
MLEQVPAL

SEQ ID NO: 6086 - protein, 10 aa, Artificial Sequence
  unidentified
MLVLCASTEL

SEQ ID NO: 6087 - protein, 8 aa, Artificial Sequence
  unidentified
QLLLTLLG

SEQ ID NO: 6088 - protein, 9 aa, Artificial Sequence
  unidentified
SLSLSLSPL

SEQ ID NO: 6089 - protein, 8 aa, Homo sapiens
LQISAIIL

SEQ ID NO: 6090 - protein, 9 aa, Homo sapiens
LQWDKVLRL

SEQ ID NO: 6091 - protein, 9 aa, Homo sapiens
LSLDKLEAA

SEQ ID NO: 6092 - protein, 9 aa, Homo sapiens
LVDDNYFYL

SEQ ID NO: 6093 - protein, 9 aa, Homo sapiens
MITDVVPEV

SEQ ID NO: 6094 - protein, 9 aa, Homo sapiens
MIWKGLIVL

SEQ ID NO: 6095 - protein, 9 aa, Homo sapiens
MLADIPVTI

SEQ ID NO: 6096 - protein, 9 aa, Homo sapiens
MLADTVATL

SEQ ID NO: 6097 - protein, 10 aa, Homo sapiens
MLAEDAIKAA

SEQ ID NO: 6098 - protein, 9 aa, Homo sapiens
MLAEIEVLR

SEQ ID NO: 6099 - protein, 9 aa, Homo sapiens
MLAKHVITL

SEQ ID NO: 6100 - protein, 11 aa, Homo sapiens
MLALTSTLNKL

SEQ ID NO: 6101 - protein, 9 aa, Homo sapiens
MLAQETLQL

SEQ ID NO: 6102 - protein, 9 aa, Homo sapiens
MLAWINESL

SEQ ID NO: 6103 - protein, 9 aa, Homo sapiens
MLDDNNHLI

SEQ ID NO: 6104 - protein, 9 aa, Homo sapiens
MLDDRAYLV

SEQ ID NO: 6105 - protein, 9 aa, Homo sapiens
MLDKYSHYL

SEQ ID NO: 6106 - protein, 9 aa, Homo sapiens
MLEIYSNLL

SEQ ID NO: 6107 - protein, 11 aa, Homo sapiens
MLENMGIGIRN

SEQ ID NO: 6108 - protein, 9 aa, Homo sapiens
MLENYSLLL

SEQ ID NO: 6109 - protein, 9 aa, Homo sapiens
MLFDKFRSV

SEQ ID NO: 6110 - protein, 10 aa, Homo sapiens
MLFEEAFVHL

SEQ ID NO: 6111 - protein, 9 aa, Homo sapiens
MLFENMGAY

SEQ ID NO: 6112 - protein, 11 aa, Homo sapiens
MLFENMGAYTV

SEQ ID NO: 6113 - protein, 9 aa, Homo sapiens
MLFLGLHNV

SEQ ID NO: 6114 - protein, 9 aa, Homo sapiens
MLFSDSPFL

SEQ ID NO: 6115 - protein, 9 aa, Homo sapiens
MLFTGGYGL

SEQ ID NO: 6116 - protein, 11 aa, Homo sapiens
MLIEEGGLQHL

SEQ ID NO: 6117 - protein, 9 aa, Homo sapiens
MLIEKDPSL

SEQ ID NO: 6118 - protein, 9 aa, Homo sapiens
MLIEVIEKL

SEQ ID NO: 6119 - protein, 10 aa, Homo sapiens
MLKEEQEVAM

SEQ ID NO: 6120 - protein, 11 aa, Homo sapiens
MLKEEQEVAML

SEQ ID NO: 6121 - protein, 9 aa, Homo sapiens
MLKEIEEIL

SEQ ID NO: 6122 - protein, 10 aa, Homo sapiens
MLKLYNGLSE

SEQ ID NO: 6123 - protein, 10 aa, Homo sapiens
MLLCPDPAVS

SEQ ID NO: 6124 - protein, 9 aa, Homo sapiens
MLLDFIQHI

SEQ ID NO: 6125 - protein, 10 aa, Homo sapiens
MLLEGGPTTA

SEQ ID NO: 6126 - protein, 9 aa, Homo sapiens
MLLEHGITL

SEQ ID NO: 6127 - protein, 10 aa, Homo sapiens
MLLEIPYMAA

SEQ ID NO: 6128 - protein, 9 aa, Homo sapiens
MLLEKSFEL

SEQ ID NO: 6129 - protein, 9 aa, Homo sapiens
MLLIEDMTK

SEQ ID NO: 6130 - protein, 10 aa, Homo sapiens
MLLIQGLQIN

SEQ ID NO: 6131 - protein, 9 aa, Homo sapiens
MLLKGEILL

SEQ ID NO: 6132 - protein, 9 aa, Homo sapiens
MLLKTVLLL

SEQ ID NO: 6133 - protein, 9 aa, Homo sapiens
MLLMLFIFI

SEQ ID NO: 6134 - protein, 10 aa, Homo sapiens
MLLQTAVLQG

SEQ ID NO: 6135 - protein, 9 aa, Homo sapiens
MLLSKVEKL

SEQ ID NO: 6136 - protein, 9 aa, Homo sapiens
MLLTAVQLL

SEQ ID NO: 6137 - protein, 9 aa, Homo sapiens
MLLTKLPTI

SEQ ID NO: 6138 - protein, 8 aa, Homo sapiens
MLMVVLLV

SEQ ID NO: 6139 - protein, 9 aa, Homo sapiens
MLNFNVPHI

SEQ ID NO: 6140 - protein, 9 aa, Homo sapiens
MLNGQEVRL

SEQ ID NO: 6141 - protein, 9 aa, Homo sapiens
MLNIVKNEL

SEQ ID NO: 6142 - protein, 9 aa, Homo sapiens
MLPISNEPI

SEQ ID NO: 6143 - protein, 8 aa, Homo sapiens
MLPPCTTT

SEQ ID NO: 6144 - protein, 11 aa, Homo sapiens
MLQDSLEHVQL

SEQ ID NO: 6145 - protein, 9 aa, Homo sapiens
MLQFDELFK

SEQ ID NO: 6146 - protein, 9 aa, Homo sapiens
MLSEHTSKL

SEQ ID NO: 6147 - protein, 10 aa, Homo sapiens
MLSEKHLISV

SEQ ID NO: 6148 - protein, 9 aa, Homo sapiens
MLSPFISSV

SEQ ID NO: 6149 - protein, 9 aa, Homo sapiens
MLSQDAPTV

SEQ ID NO: 6150 - protein, 9 aa, Homo sapiens
MLTDLNTYL

SEQ ID NO: 6151 - protein, 9 aa, Homo sapiens
MLTDRIPWV

SEQ ID NO: 6152 - protein, 9 aa, Homo sapiens
MLTEIEHKV

SEQ ID NO: 6153 - protein, 9 aa, Homo sapiens
MLTGISPFL

SEQ ID NO: 6154 - protein, 9 aa, Homo sapiens
MLVNAVFYL

SEQ ID NO: 6155 - protein, 9 aa, Homo sapiens
MLVQGNWVV

SEQ ID NO: 6156 - protein, 9 aa, Homo sapiens
MLWKATIVL

SEQ ID NO: 6157 - protein, 9 aa, Homo sapiens
MLYEKLLTA

SEQ ID NO: 6158 - protein, 10 aa, Homo sapiens
MLYPEVIQQV

SEQ ID NO: 6159 - protein, 11 aa, Homo sapiens
MLYPGSVYLLQ

SEQ ID NO: 6160 - protein, 9 aa, Homo sapiens
MLYPKLISL

SEQ ID NO: 6161 - protein, 9 aa, Homo sapiens
MLYQTINSL

SEQ ID NO: 6162 - protein, 9 aa, Homo sapiens
MMLDDLLQL

SEQ ID NO: 6163 - protein, 11 aa, Homo sapiens
MQAPRAALVFA

SEQ ID NO: 6164 - protein, 8 aa, Homo sapiens
MSAELSWL

SEQ ID NO: 6165 - protein, 10 aa, Homo sapiens
MTAQAMSLSL

SEQ ID NO: 6166 - protein, 9 aa, Homo sapiens
MVDSKPVNL

SEQ ID NO: 6167 - protein, 9 aa, Homo sapiens
MVWVLGVII

SEQ ID NO: 6168 - protein, 11 aa, Homo sapiens
NIFPNPEATFV

SEQ ID NO: 6169 - protein, 10 aa, Homo sapiens
NILLGGLNLL

SEQ ID NO: 6170 - protein, 9 aa, Homo sapiens
NIMDFKLFL

SEQ ID NO: 6171 - protein, 9 aa, Homo sapiens
NIMDIKIGL

SEQ ID NO: 6172 - protein, 9 aa, Homo sapiens
NIWNINLQL

SEQ ID NO: 6173 - protein, 9 aa, Homo sapiens
NLAGVYSEV

SEQ ID NO: 6174 - protein, 9 aa, Homo sapiens
NLAIIITDV

SEQ ID NO: 6175 - protein, 11 aa, Homo sapiens
NLAPTDVLEAL

SEQ ID NO: 6176 - protein, 9 aa, Homo sapiens
NLARALQQV

SEQ ID NO: 6177 - protein, 9 aa, Homo sapiens
NLDFNPPHV

SEQ ID NO: 6178 - protein, 9 aa, Homo sapiens
NLDNPIQTV

SEQ ID NO: 6179 - protein, 9 aa, Homo sapiens
NLDPAALTL

SEQ ID NO: 6180 - protein, 9 aa, Homo sapiens
NLFAQTYGL

SEQ ID NO: 6181 - protein, 11 aa, Homo sapiens
NLFDISQSAQT

SEQ ID NO: 6182 - protein, 9 aa, Homo sapiens
NLFEWHFTV

SEQ ID NO: 6183 - protein, 9 aa, Homo sapiens
NLFKKVYLL

SEQ ID NO: 6184 - protein, 9 aa, Homo sapiens
NLFRAPIYL

SEQ ID NO: 6185 - protein, 9 aa, Homo sapiens
NLGILSTLL

SEQ ID NO: 6186 - protein, 9 aa, Homo sapiens
NLIANVLYL

SEQ ID NO: 6187 - protein, 8 aa, Homo sapiens
NLIDLDDL

SEQ ID NO: 6188 - protein, 9 aa, Homo sapiens
NLIEVNEEV

SEQ ID NO: 6189 - protein, 9 aa, Homo sapiens
NLIKELARV

SEQ ID NO: 6190 - protein, 9 aa, Homo sapiens
NLIPILKTV

SEQ ID NO: 6191 - protein, 9 aa, Homo sapiens
NLLAHIWAL

SEQ ID NO: 6192 - protein, 11 aa, Homo sapiens
NLLDLNQKLQL

SEQ ID NO: 6193 - protein, 11 aa, Homo sapiens
NLLDSKINTLL

SEQ ID NO: 6194 - protein, 11 aa, Homo sapiens
NLLDSNAVHHI

SEQ ID NO: 6195 - protein, 9 aa, Homo sapiens
NLLETKLQL

SEQ ID NO: 6196 - protein, 8 aa, Homo sapiens
NLLLTVQI

SEQ ID NO: 6197 - protein, 9 aa, Homo sapiens
NLLPHAINL

SEQ ID NO: 6198 - protein, 11 aa, Homo sapiens
NLLPYSLRYLL

SEQ ID NO: 6199 - protein, 9 aa, Homo sapiens
NLLRFIQEV

SEQ ID NO: 6200 - protein, 9 aa, Homo sapiens
NLLRRLWVV

SEQ ID NO: 6201 - protein, 9 aa, Homo sapiens
NLLYPVPLI

SEQ ID NO: 6202 - protein, 9 aa, Homo sapiens
NLMDIKIGL

SEQ ID NO: 6203 - protein, 9 aa, Homo sapiens
NLMEKLETL

SEQ ID NO: 6204 - protein, 9 aa, Homo sapiens
NLMEKTVEV

SEQ ID NO: 6205 - protein, 9 aa, Homo sapiens
NLMESLDSL

SEQ ID NO: 6206 - protein, 9 aa, Homo sapiens
NLNSIVPSV

SEQ ID NO: 6207 - protein, 11 aa, Homo sapiens
NLSETASTMAL

SEQ ID NO: 6208 - protein, 9 aa, Homo sapiens
NLTENLQYV

SEQ ID NO: 6209 - protein, 9 aa, Homo sapiens
NLTKIVAYL

SEQ ID NO: 6210 - protein, 9 aa, Homo sapiens
NLVPMIIHL

SEQ ID NO: 6211 - protein, 9 aa, Homo sapiens
NLVRELLAV

SEQ ID NO: 6212 - protein, 9 aa, Homo sapiens
NLWSLVAKV

SEQ ID NO: 6213 - protein, 9 aa, Homo sapiens
NLYAQMHGL

SEQ ID NO: 6214 - protein, 9 aa, Homo sapiens
NLYGLLHGL

SEQ ID NO: 6215 - protein, 9 aa, Homo sapiens
NLYGQPVAA

SEQ ID NO: 6216 - protein, 9 aa, Homo sapiens
NLYMHQVLI

SEQ ID NO: 6217 - protein, 11 aa, Homo sapiens
NMLDVNGLFTL

SEQ ID NO: 6218 - protein, 9 aa, Homo sapiens
NMLNLAVHL

SEQ ID NO: 6219 - protein, 9 aa, Homo sapiens
NMLPQIFRV

SEQ ID NO: 6220 - protein, 11 aa, Homo sapiens
NMYEGVGRMFI

SEQ ID NO: 6221 - protein, 9 aa, Homo sapiens
NQMPTQPQV

SEQ ID NO: 6222 - protein, 8 aa, Homo sapiens
NVAVIPTV

SEQ ID NO: 6223 - protein, 8 aa, Homo sapiens
NVVALVAV

SEQ ID NO: 6224 - protein, 11 aa, Homo sapiens
PLAAAAAAAAA

SEQ ID NO: 6225 - protein, 9 aa, Homo sapiens
PLEVSSVVI

SEQ ID NO: 6226 - protein, 9 aa, Homo sapiens
PLFICGEPI

SEQ ID NO: 6227 - protein, 9 aa, Homo sapiens
PLGPAPVSV

SEQ ID NO: 6228 - protein, 10 aa, Homo sapiens
PLGSTQDHAL

SEQ ID NO: 6229 - protein, 9 aa, Homo sapiens
PLLLAAAGL

SEQ ID NO: 6230 - protein, 8 aa, Homo sapiens
PLLLAPEN

SEQ ID NO: 6231 - protein, 9 aa, Homo sapiens
PLLYSIPEL

SEQ ID NO: 6232 - protein, 8 aa, Homo sapiens
PLQHRHVL

SEQ ID NO: 6233 - protein, 8 aa, Homo sapiens
PLRPLEFL

SEQ ID NO: 6234 - protein, 9 aa, Homo sapiens
PLSAARAAL

SEQ ID NO: 6235 - protein, 9 aa, Homo sapiens
PLSEVIVKN

SEQ ID NO: 6236 - protein, 8 aa, Homo sapiens
PLSMIVAI

SEQ ID NO: 6237 - protein, 9 aa, Homo sapiens
PLSPHLGPL

SEQ ID NO: 6238 - protein, 10 aa, Homo sapiens
PLSRSAPTTL

SEQ ID NO: 6239 - protein, 9 aa, Homo sapiens
PLSYLPTSL

SEQ ID NO: 6240 - protein, 9 aa, Homo sapiens
QILDGVHYL

SEQ ID NO: 6241 - protein, 10 aa, Homo sapiens
QLADDLKAQL

SEQ ID NO: 6242 - protein, 9 aa, Homo sapiens
QLAEDLKKV

SEQ ID NO: 6243 - protein, 9 aa, Homo sapiens
QLAESVANV

SEQ ID NO: 6244 - protein, 9 aa, Homo sapiens
QLAFHQFYI

SEQ ID NO: 6245 - protein, 9 aa, Homo sapiens
QLAGFPVTV

SEQ ID NO: 6246 - protein, 9 aa, Homo sapiens
QLAIGVNEV

SEQ ID NO: 6247 - protein, 10 aa, Homo sapiens
QLANEEIAQV

SEQ ID NO: 6248 - protein, 9 aa, Homo sapiens
QLCEPLPSL

SEQ ID NO: 6249 - protein, 10 aa, Homo sapiens
QLDEARGLLL

SEQ ID NO: 6250 - protein, 10 aa, Homo sapiens
QLDENANVQL

SEQ ID NO: 6251 - protein, 9 aa, Homo sapiens
QLENLVQEL

SEQ ID NO: 6252 - protein, 9 aa, Homo sapiens
QLFEKQLQL

SEQ ID NO: 6253 - protein, 10 aa, Homo sapiens
QLFGGQLGQI

SEQ ID NO: 6254 - protein, 9 aa, Homo sapiens
QLFLLDIAQ

SEQ ID NO: 6255 - protein, 9 aa, Homo sapiens
QLFSEIHNL

SEQ ID NO: 6256 - protein, 9 aa, Homo sapiens
QLFSQQHFL

SEQ ID NO: 6257 - protein, 9 aa, Homo sapiens
QLIDAVLNL

SEQ ID NO: 6258 - protein, 11 aa, Homo sapiens
QLIDIIHTAAA

SEQ ID NO: 6259 - protein, 9 aa, Homo sapiens
QLIDYERQL

SEQ ID NO: 6260 - protein, 9 aa, Homo sapiens
QLIERILEA

SEQ ID NO: 6261 - protein, 9 aa, Homo sapiens
QLIEVIEKL

SEQ ID NO: 6262 - protein, 9 aa, Homo sapiens
QLIPALAKV

SEQ ID NO: 6263 - protein, 9 aa, Homo sapiens
QLIRNLEEV

SEQ ID NO: 6264 - protein, 9 aa, Homo sapiens
QLISSNLEL

SEQ ID NO: 6265 - protein, 9 aa, Homo sapiens
QLKKQAEQL

SEQ ID NO: 6266 - protein, 9 aa, Homo sapiens
QLLAILPEA

SEQ ID NO: 6267 - protein, 9 aa, Homo sapiens
QLLDFERTL

SEQ ID NO: 6268 - protein, 9 aa, Homo sapiens
QLLDFSQKL

SEQ ID NO: 6269 - protein, 10 aa, Homo sapiens
QLLDGFMITL

SEQ ID NO: 6270 - protein, 10 aa, Homo sapiens
QLLEALLFRV

SEQ ID NO: 6271 - protein, 9 aa, Homo sapiens
QLLEEKDLL

SEQ ID NO: 6272 - protein, 9 aa, Homo sapiens
QLLELRKIL

SEQ ID NO: 6273 - protein, 9 aa, Homo sapiens
QLLERQPLL

SEQ ID NO: 6274 - protein, 11 aa, Homo sapiens
QLLKDAAAFLL

SEQ ID NO: 6275 - protein, 9 aa, Homo sapiens
QLLPLLEKV

SEQ ID NO: 6276 - protein, 9 aa, Homo sapiens
QLLQFETQV

SEQ ID NO: 6277 - protein, 10 aa, Homo sapiens
QLLQGSLPLE

SEQ ID NO: 6278 - protein, 9 aa, Homo sapiens
QLLQYVYNL

SEQ ID NO: 6279 - protein, 9 aa, Homo sapiens
QLLSHLHTL

SEQ ID NO: 6280 - protein, 9 aa, Homo sapiens
QLLTAIVKL

SEQ ID NO: 6281 - protein, 9 aa, Homo sapiens
QLLTGSPEL

SEQ ID NO: 6282 - protein, 9 aa, Homo sapiens
QLLTQIHLL

SEQ ID NO: 6283 - protein, 9 aa, Homo sapiens
QLNDVAHLV

SEQ ID NO: 6284 - protein, 9 aa, Homo sapiens
QLNEQLVTL

SEQ ID NO: 6285 - protein, 9 aa, Homo sapiens
QLPNFAFSV

SEQ ID NO: 6286 - protein, 9 aa, Homo sapiens
QLPSASTGI

SEQ ID NO: 6287 - protein, 10 aa, Homo sapiens
QLPTLLIAEC

SEQ ID NO: 6288 - protein, 9 aa, Homo sapiens
QLPYSLALL

SEQ ID NO: 6289 - protein, 9 aa, Homo sapiens
QLQDFDWQV

SEQ ID NO: 6290 - protein, 9 aa, Homo sapiens
QLQDRVYAL

SEQ ID NO: 6291 - protein, 11 aa, Homo sapiens
QLQDVHLLQSV

SEQ ID NO: 6292 - protein, 9 aa, Homo sapiens
QLQEELHQL

SEQ ID NO: 6293 - protein, 9 aa, Homo sapiens
QLQEENFRL

SEQ ID NO: 6294 - protein, 9 aa, Homo sapiens
QLQEETFRL

SEQ ID NO: 6295 - protein, 9 aa, Homo sapiens
QLQEKIKLE

SEQ ID NO: 6296 - protein, 9 aa, Homo sapiens
QLQKMVHDI

SEQ ID NO: 6297 - protein, 9 aa, Homo sapiens
QLRLPGQQL

SEQ ID NO: 6298 - protein, 9 aa, Homo sapiens
QLSEVFIQL

SEQ ID NO: 6299 - protein, 9 aa, Homo sapiens
QLSLLVEAQ

SEQ ID NO: 6300 - protein, 10 aa, Homo sapiens
QLSLSSRLQL

SEQ ID NO: 6301 - protein, 8 aa, Homo sapiens
QLTALLAA

SEQ ID NO: 6302 - protein, 9 aa, Homo sapiens
QLTDLNVQL

SEQ ID NO: 6303 - protein, 9 aa, Homo sapiens
QLTEIKPLL

SEQ ID NO: 6304 - protein, 9 aa, Homo sapiens
QLTRMAGAI

SEQ ID NO: 6305 - protein, 9 aa, Homo sapiens
QLTSNLAQV

SEQ ID NO: 6306 - protein, 11 aa, Homo sapiens
QLVAVEALIHA

SEQ ID NO: 6307 - protein, 9 aa, Homo sapiens
QLVDFQWKL

SEQ ID NO: 6308 - protein, 9 aa, Homo sapiens
QLVDTTVEL

SEQ ID NO: 6309 - protein, 9 aa, Homo sapiens
QLVEELLKI

SEQ ID NO: 6310 - protein, 9 aa, Homo sapiens
QLVEQVEQI

SEQ ID NO: 6311 - protein, 9 aa, Homo sapiens
QLVPALAKV

SEQ ID NO: 6312 - protein, 11 aa, Homo sapiens
QLVPVDIIESV

SEQ ID NO: 6313 - protein, 9 aa, Homo sapiens
QLVRDLLEV

SEQ ID NO: 6314 - protein, 9 aa, Homo sapiens
QLWNIFNQV

SEQ ID NO: 6315 - protein, 9 aa, Homo sapiens
QLYEFDIKV

SEQ ID NO: 6316 - protein, 9 aa, Homo sapiens
QLYQLFHYL

SEQ ID NO: 6317 - protein, 11 aa, Homo sapiens
QLYQRSGDMGL

SEQ ID NO: 6318 - protein, 10 aa, Homo sapiens
QLYRGLGGQL

SEQ ID NO: 6319 - protein, 9 aa, Homo sapiens
QMLELITRL

SEQ ID NO: 6320 - protein, 9 aa, Homo sapiens
QMLENQMEV

SEQ ID NO: 6321 - protein, 11 aa, Homo sapiens
QMLPLNTNIRL

SEQ ID NO: 6322 - protein, 9 aa, Homo sapiens
QMPETTETV

SEQ ID NO: 6323 - protein, 10 aa, Homo sapiens
QMPTLPPPSV

SEQ ID NO: 6324 - protein, 9 aa, Homo sapiens
QMVKELQEI

SEQ ID NO: 6325 - protein, 11 aa, Homo sapiens
QQLDSKFLEQV

SEQ ID NO: 6326 - protein, 9 aa, Homo sapiens
QTMSHLPQV

SEQ ID NO: 6327 - protein, 9 aa, Homo sapiens
RALPSIILL

SEQ ID NO: 6328 - protein, 11 aa, Homo sapiens
RIASWLPSFSV

SEQ ID NO: 6329 - protein, 9 aa, Homo sapiens
RIMEAIENV

SEQ ID NO: 6330 - protein, 9 aa, Homo sapiens
RLADALQEL

SEQ ID NO: 6331 - protein, 10 aa, Homo sapiens
RLADDLNEKI

SEQ ID NO: 6332 - protein, 10 aa, Homo sapiens
RLADLEALKV

SEQ ID NO: 6333 - protein, 9 aa, Homo sapiens
RLAEETEKL

SEQ ID NO: 6334 - protein, 9 aa, Homo sapiens
RLAELEEFI

SEQ ID NO: 6335 - protein, 9 aa, Homo sapiens
RLAELGLHL

SEQ ID NO: 6336 - protein, 9 aa, Homo sapiens
RLAELLVSV

SEQ ID NO: 6337 - protein, 9 aa, Homo sapiens
RLAELQEQL

SEQ ID NO: 6338 - protein, 11 aa, Homo sapiens
RLAETLAQIYL

SEQ ID NO: 6339 - protein, 9 aa, Homo sapiens
RLAETQEEI

SEQ ID NO: 6340 - protein, 9 aa, Homo sapiens
RLAEVEEKL

SEQ ID NO: 6341 - protein, 9 aa, Homo sapiens
RLAKELEEA

SEQ ID NO: 6342 - protein, 9 aa, Homo sapiens
RLALLKVLL

SEQ ID NO: 6343 - protein, 9 aa, Homo sapiens
RLANLLMLL

SEQ ID NO: 6344 - protein, 9 aa, Homo sapiens
RLANSISQV

SEQ ID NO: 6345 - protein, 9 aa, Homo sapiens
RLAPEIVSA

SEQ ID NO: 6346 - protein, 8 aa, Homo sapiens
RLAQAASL

SEQ ID NO: 6347 - protein, 9 aa, Homo sapiens
RLAQAMETA

SEQ ID NO: 6348 - protein, 10 aa, Homo sapiens
RLAQEGIYTL

SEQ ID NO: 6349 - protein, 9 aa, Homo sapiens
RLAQVSPEL

SEQ ID NO: 6350 - protein, 9 aa, Homo sapiens
RLASEIPVL

SEQ ID NO: 6351 - protein, 9 aa, Homo sapiens
RLASVAQEL

SEQ ID NO: 6352 - protein, 10 aa, Homo sapiens
RLEKKLNAFE

SEQ ID NO: 6353 - protein, 10 aa, Homo sapiens
RLFADILNDV

SEQ ID NO: 6354 - protein, 9 aa, Homo sapiens
RLFDDVPQV

SEQ ID NO: 6355 - protein, 11 aa, Homo sapiens
RLFDEGTISKW

SEQ ID NO: 6356 - protein, 9 aa, Homo sapiens
RLFDEPQLA

SEQ ID NO: 6357 - protein, 11 aa, Homo sapiens
RLFDTQSKEKL

SEQ ID NO: 6358 - protein, 9 aa, Homo sapiens
RLFDWLVSV

SEQ ID NO: 6359 - protein, 9 aa, Homo sapiens
RLFEGNALL

SEQ ID NO: 6360 - protein, 9 aa, Homo sapiens
RLFESINNL

SEQ ID NO: 6361 - protein, 10 aa, Homo sapiens
RLFGGLILDI

SEQ ID NO: 6362 - protein, 11 aa, Homo sapiens
RLFHDSAVTSV

SEQ ID NO: 6363 - protein, 10 aa, Homo sapiens
RLFPGLAIKI

SEQ ID NO: 6364 - protein, 9 aa, Homo sapiens
RLFQKTLKL

SEQ ID NO: 6365 - protein, 9 aa, Homo sapiens
RLFRDLVSL

SEQ ID NO: 6366 - protein, 10 aa, Homo sapiens
RLFSKSIETL

SEQ ID NO: 6367 - protein, 9 aa, Homo sapiens
RLGDAILSV

SEQ ID NO: 6368 - protein, 11 aa, Homo sapiens
RLGEKEILEKA

SEQ ID NO: 6369 - protein, 9 aa, Homo sapiens
RLGQLEGLL

SEQ ID NO: 6370 - protein, 10 aa, Homo sapiens
RLGSFHELLL

SEQ ID NO: 6371 - protein, 10 aa, Homo sapiens
RLHDLVLPLV

SEQ ID NO: 6372 - protein, 9 aa, Homo sapiens
RLHDVLMEL

SEQ ID NO: 6373 - protein, 9 aa, Homo sapiens
RLHEFDEQV

SEQ ID NO: 6374 - protein, 9 aa, Homo sapiens
RLHERLVAI

SEQ ID NO: 6375 - protein, 9 aa, Homo sapiens
RLHNTIVEI

SEQ ID NO: 6376 - protein, 9 aa, Homo sapiens
RLHQINIYL

SEQ ID NO: 6377 - protein, 8 aa, Homo sapiens
RLHSYVKA

SEQ ID NO: 6378 - protein, 9 aa, Homo sapiens
RLIALLEVL

SEQ ID NO: 6379 - protein, 9 aa, Homo sapiens
RLIALSFGL

SEQ ID NO: 6380 - protein, 11 aa, Homo sapiens
RLIDDEVRILI

SEQ ID NO: 6381 - protein, 9 aa, Homo sapiens
RLIDHLENT

SEQ ID NO: 6382 - protein, 9 aa, Homo sapiens
RLIEEENML

SEQ ID NO: 6383 - protein, 9 aa, Homo sapiens
RLIEESVTV

SEQ ID NO: 6384 - protein, 10 aa, Homo sapiens
RLIEVNGVDL

SEQ ID NO: 6385 - protein, 9 aa, Homo sapiens
RLIFHLVKV

SEQ ID NO: 6386 - protein, 10 aa, Homo sapiens
RLIGIKDMYA

SEQ ID NO: 6387 - protein, 10 aa, Homo sapiens
RLIKQILEGV

SEQ ID NO: 6388 - protein, 9 aa, Homo sapiens
RLISETTSV

SEQ ID NO: 6389 - protein, 10 aa, Homo sapiens
RLISQIVSSI

SEQ ID NO: 6390 - protein, 9 aa, Homo sapiens
RLISTLENL

SEQ ID NO: 6391 - protein, 9 aa, Homo sapiens
RLISVLEQI

SEQ ID NO: 6392 - protein, 9 aa, Homo sapiens
RLKEELEEA

SEQ ID NO: 6393 - protein, 9 aa, Homo sapiens
RLLAQVPGL

SEQ ID NO: 6394 - protein, 9 aa, Homo sapiens
RLLATIVML

SEQ ID NO: 6395 - protein, 9 aa, Homo sapiens
RLLAYISQV

SEQ ID NO: 6396 - protein, 9 aa, Homo sapiens
RLLDALEFL

SEQ ID NO: 6397 - protein, 11 aa, Homo sapiens
RLLDDNRELLV

SEQ ID NO: 6398 - protein, 9 aa, Homo sapiens
RLLDETLTL

SEQ ID NO: 6399 - protein, 11 aa, Homo sapiens
RLLDFPEAMVL

SEQ ID NO: 6400 - protein, 9 aa, Homo sapiens
RLLDFPTLL

SEQ ID NO: 6401 - protein, 10 aa, Homo sapiens
RLLDFPTLLV

SEQ ID NO: 6402 - protein, 11 aa, Homo sapiens
RLLDGGDFVSL

SEQ ID NO: 6403 - protein, 11 aa, Homo sapiens
RLLDKLVGEFL

SEQ ID NO: 6404 - protein, 11 aa, Homo sapiens
RLLDLDIPMSV

SEQ ID NO: 6405 - protein, 10 aa, Homo sapiens
RLLDLENSLL

SEQ ID NO: 6406 - protein, 10 aa, Homo sapiens
RLLDMGETDL

SEQ ID NO: 6407 - protein, 10 aa, Homo sapiens
RLLDSGAFHL

SEQ ID NO: 6408 - protein, 9 aa, Homo sapiens
RLLDTNPEI

SEQ ID NO: 6409 - protein, 11 aa, Homo sapiens
RLLDVDNRVVL

SEQ ID NO: 6410 - protein, 10 aa, Homo sapiens
RLLEEEGVSL

SEQ ID NO: 6411 - protein, 9 aa, Homo sapiens
RLLEELQRL

SEQ ID NO: 6412 - protein, 10 aa, Homo sapiens
RLLEEREVLL

SEQ ID NO: 6413 - protein, 10 aa, Homo sapiens
RLLEFELAQL

SEQ ID NO: 6414 - protein, 11 aa, Homo sapiens
RLLEIPAVSHV

SEQ ID NO: 6415 - protein, 9 aa, Homo sapiens
RLLELLTKL

SEQ ID NO: 6416 - protein, 9 aa, Homo sapiens
RLLENMTEV

SEQ ID NO: 6417 - protein, 10 aa, Homo sapiens
RLLENMTEVV

SEQ ID NO: 6418 - protein, 11 aa, Homo sapiens
RLLEPAQVQQL

SEQ ID NO: 6419 - protein, 11 aa, Homo sapiens
RLLESLDQLEL

SEQ ID NO: 6420 - protein, 9 aa, Homo sapiens
RLLESLIRL

SEQ ID NO: 6421 - protein, 10 aa, Homo sapiens
RLLGEEVVRV

SEQ ID NO: 6422 - protein, 9 aa, Homo sapiens
RLLGKLPEL

SEQ ID NO: 6423 - protein, 9 aa, Homo sapiens
RLLHEVQEL

SEQ ID NO: 6424 - protein, 9 aa, Homo sapiens
RLLLLVPLL

SEQ ID NO: 6425 - protein, 9 aa, Homo sapiens
RLLNFDTEL

SEQ ID NO: 6426 - protein, 9 aa, Homo sapiens
RLLNILMQL

SEQ ID NO: 6427 - protein, 9 aa, Homo sapiens
RLLPDIRGV

SEQ ID NO: 6428 - protein, 10 aa, Homo sapiens
RLLPEKLTIY

SEQ ID NO: 6429 - protein, 11 aa, Homo sapiens
RLLPELRDWGV

SEQ ID NO: 6430 - protein, 11 aa, Homo sapiens
RLLPGDIILKV

SEQ ID NO: 6431 - protein, 9 aa, Homo sapiens
RLLPKVQEV

SEQ ID NO: 6432 - protein, 11 aa, Homo sapiens
RLLPPELLRQL

SEQ ID NO: 6433 - protein, 9 aa, Homo sapiens
RLLSFVVLA

SEQ ID NO: 6434 - protein, 11 aa, Homo sapiens
RLMDDTSIAAA

SEQ ID NO: 6435 - protein, 9 aa, Homo sapiens
RLMEAMSEV

SEQ ID NO: 6436 - protein, 11 aa, Homo sapiens
RLMEDVEAEKL

SEQ ID NO: 6437 - protein, 11 aa, Homo sapiens
RLMEPIYLVEI

SEQ ID NO: 6438 - protein, 11 aa, Homo sapiens
RLMEPYYFVEV

SEQ ID NO: 6439 - protein, 10 aa, Homo sapiens
RLMEQQGALL

SEQ ID NO: 6440 - protein, 11 aa, Homo sapiens
RLMGLLSDPEL

SEQ ID NO: 6441 - protein, 9 aa, Homo sapiens
RLMKELEEI

SEQ ID NO: 6442 - protein, 9 aa, Homo sapiens
RLMKGEITL

SEQ ID NO: 6443 - protein, 10 aa, Homo sapiens
RLMQGDEICL

SEQ ID NO: 6444 - protein, 9 aa, Homo sapiens
RLNEIEAAL

SEQ ID NO: 6445 - protein, 11 aa, Homo sapiens
RLNEQASEEIL

SEQ ID NO: 6446 - protein, 9 aa, Homo sapiens
RLNPINTTL

SEQ ID NO: 6447 - protein, 9 aa, Homo sapiens
RLNPLVLLL

SEQ ID NO: 6448 - protein, 11 aa, Homo sapiens
RLPMSIIIVGV

SEQ ID NO: 6449 - protein, 11 aa, Homo sapiens
RLPPEGILHNV

SEQ ID NO: 6450 - protein, 11 aa, Homo sapiens
RLPPPFPGLEP

SEQ ID NO: 6451 - protein, 9 aa, Homo sapiens
RLQDLQQQV

SEQ ID NO: 6452 - protein, 9 aa, Homo sapiens
RLQEELEKL

SEQ ID NO: 6453 - protein, 10 aa, Homo sapiens
RLQEGDLPNA

SEQ ID NO: 6454 - protein, 9 aa, Homo sapiens
RLQELELQL

SEQ ID NO: 6455 - protein, 11 aa, Homo sapiens
RLQETEGMVAV

SEQ ID NO: 6456 - protein, 9 aa, Homo sapiens
RLQGELQAV

SEQ ID NO: 6457 - protein, 9 aa, Homo sapiens
RLQKELAEA

SEQ ID NO: 6458 - protein, 9 aa, Homo sapiens
RLQQELMTL

SEQ ID NO: 6459 - protein, 9 aa, Homo sapiens
RLQQTQAQV

SEQ ID NO: 6460 - protein, 10 aa, Homo sapiens
RLRATCTLSG

SEQ ID NO: 6461 - protein, 9 aa, Homo sapiens
RLSDFTESL

SEQ ID NO: 6462 - protein, 9 aa, Homo sapiens
RLSDQVLFV

SEQ ID NO: 6463 - protein, 11 aa, Homo sapiens
RLSEEASQALI

SEQ ID NO: 6464 - protein, 9 aa, Homo sapiens
RLSETDFKV

SEQ ID NO: 6465 - protein, 9 aa, Homo sapiens
RLSPYLEDV

SEQ ID NO: 6466 - protein, 9 aa, Homo sapiens
RLSSLLALL

SEQ ID NO: 6467 - protein, 9 aa, Homo sapiens
RLSSQLILL

SEQ ID NO: 6468 - protein, 9 aa, Homo sapiens
RLTELETAV

SEQ ID NO: 6469 - protein, 10 aa, Homo sapiens
RLTSLGVIGA

SEQ ID NO: 6470 - protein, 9 aa, Homo sapiens
RLTSLVPFV

SEQ ID NO: 6471 - protein, 9 aa, Homo sapiens
RLVESKVEL

SEQ ID NO: 6472 - protein, 10 aa, Homo sapiens
RLVEVNGENV

SEQ ID NO: 6473 - protein, 11 aa, Homo sapiens
RLVGDGVYGVP

SEQ ID NO: 6474 - protein, 9 aa, Homo sapiens
RLVGIMLLL

SEQ ID NO: 6475 - protein, 9 aa, Homo sapiens
RLVNYQISV

SEQ ID NO: 6476 - protein, 9 aa, Homo sapiens
RLVPSVNGV

SEQ ID NO: 6477 - protein, 9 aa, Homo sapiens
RLVSLITLL

SEQ ID NO: 6478 - protein, 11 aa, Homo sapiens
RLWDLTTGTTT

SEQ ID NO: 6479 - protein, 9 aa, Homo sapiens
RLWDWVPLA

SEQ ID NO: 6480 - protein, 9 aa, Homo sapiens
RLWEGAISI

SEQ ID NO: 6481 - protein, 9 aa, Homo sapiens
RLWEKLTLL

SEQ ID NO: 6482 - protein, 11 aa, Homo sapiens
RLWEQLVHFHV

SEQ ID NO: 6483 - protein, 11 aa, Homo sapiens
RLWGIPDQARV

SEQ ID NO: 6484 - protein, 10 aa, Homo sapiens
RLWNETVELF

SEQ ID NO: 6485 - protein, 8 aa, Homo sapiens
RLWQELSD

SEQ ID NO: 6486 - protein, 10 aa, Homo sapiens
RLYDRDVASA

SEQ ID NO: 6487 - protein, 10 aa, Homo sapiens
RLYDSILASL

SEQ ID NO: 6488 - protein, 9 aa, Homo sapiens
RLYDTHITV

SEQ ID NO: 6489 - protein, 9 aa, Homo sapiens
RLYETSYRL

SEQ ID NO: 6490 - protein, 9 aa, Homo sapiens
RLYGKDYNV

SEQ ID NO: 6491 - protein, 11 aa, Homo sapiens
RLYHEADKTYM

SEQ ID NO: 6492 - protein, 9 aa, Homo sapiens
RLYHITDQV

SEQ ID NO: 6493 - protein, 11 aa, Homo sapiens
RMATGLERMGA

SEQ ID NO: 6494 - protein, 9 aa, Homo sapiens
RMDELFVLI

SEQ ID NO: 6495 - protein, 11 aa, Homo sapiens
RMFDMGFEYQV

SEQ ID NO: 6496 - protein, 11 aa, Homo sapiens
RMLDSVEKLLV

SEQ ID NO: 6497 - protein, 11 aa, Homo sapiens
RMLEDRDLFVM

SEQ ID NO: 6498 - protein, 9 aa, Homo sapiens
RMNPNSPSI

SEQ ID NO: 6499 - protein, 9 aa, Homo sapiens
RMPSAGTTL

SEQ ID NO: 6500 - protein, 11 aa, Homo sapiens
RMTDQEAIQDL

SEQ ID NO: 6501 - protein, 9 aa, Homo sapiens
RQIDDILSV

SEQ ID NO: 6502 - protein, 9 aa, Homo sapiens
RQIEYEYKL

SEQ ID NO: 6503 - protein, 9 aa, Homo sapiens
RTLDFDPLL

SEQ ID NO: 6504 - protein, 9 aa, Homo sapiens
RVADRLYGV

SEQ ID NO: 6505 - protein, 9 aa, Homo sapiens
RVDEEPTTL

SEQ ID NO: 6506 - protein, 11 aa, Homo sapiens
RVIDYILDLQV

SEQ ID NO: 6507 - protein, 10 aa, Homo sapiens
RVLGPKIEAV

SEQ ID NO: 6508 - protein, 11 aa, Homo sapiens
RVMEELPLMLL

SEQ ID NO: 6509 - protein, 9 aa, Homo sapiens
RVMELFFTV

SEQ ID NO: 6510 - protein, 10 aa, Homo sapiens
SAIQILLTLL

SEQ ID NO: 6511 - protein, 9 aa, Homo sapiens
SIFEFVHAL

SEQ ID NO: 6512 - protein, 11 aa, Homo sapiens
SIFGEDALANV

SEQ ID NO: 6513 - protein, 8 aa, Homo sapiens
SIFKAWAV

SEQ ID NO: 6514 - protein, 9 aa, Homo sapiens
SIHDVTFQV

SEQ ID NO: 6515 - protein, 11 aa, Homo sapiens
SIKADEVLAEV

SEQ ID NO: 6516 - protein, 10 aa, Homo sapiens
SILDRDDIFV

SEQ ID NO: 6517 - protein, 11 aa, Homo sapiens
SILGNIENLKL

SEQ ID NO: 6518 - protein, 9 aa, Homo sapiens
SILKKVLEA

SEQ ID NO: 6519 - protein, 9 aa, Homo sapiens
SISLLLNFL

SEQ ID NO: 6520 - protein, 9 aa, Homo sapiens
SIYEYYHAL

SEQ ID NO: 6521 - protein, 10 aa, Homo sapiens
SLAAEESELR

SEQ ID NO: 6522 - protein, 9 aa, Homo sapiens
SLAAVEVLV

SEQ ID NO: 6523 - protein, 9 aa, Homo sapiens
SLAAVSQQL

SEQ ID NO: 6524 - protein, 9 aa, Homo sapiens
SLADFMQEV

SEQ ID NO: 6525 - protein, 9 aa, Homo sapiens
SLADVESQV

SEQ ID NO: 6526 - protein, 9 aa, Homo sapiens
SLADVEVVV

SEQ ID NO: 6527 - protein, 9 aa, Homo sapiens
SLADYITAA

SEQ ID NO: 6528 - protein, 9 aa, Homo sapiens
SLAEEHEGL

SEQ ID NO: 6529 - protein, 9 aa, Homo sapiens
SLAEFVQSL

SEQ ID NO: 6530 - protein, 10 aa, Homo sapiens
SLAEGSVTSV

SEQ ID NO: 6531 - protein, 11 aa, Homo sapiens
SLAELDEKISA

SEQ ID NO: 6532 - protein, 9 aa, Homo sapiens
SLAESLDQA

SEQ ID NO: 6533 - protein, 10 aa, Homo sapiens
SLAEVAGLQV

SEQ ID NO: 6534 - protein, 9 aa, Homo sapiens
SLAEVNTQL

SEQ ID NO: 6535 - protein, 9 aa, Homo sapiens
SLAEYIDMI

SEQ ID NO: 6536 - protein, 9 aa, Homo sapiens
SLAGNTYQL

SEQ ID NO: 6537 - protein, 9 aa, Homo sapiens
SLAGSLRSV

SEQ ID NO: 6538 - protein, 10 aa, Homo sapiens
SLAIIAANLS

SEQ ID NO: 6539 - protein, 9 aa, Homo sapiens
SLAMLLRLY

SEQ ID NO: 6540 - protein, 10 aa, Homo sapiens
SLAPAGIADA

SEQ ID NO: 6541 - protein, 9 aa, Homo sapiens
SLAPATPEV

SEQ ID NO: 6542 - protein, 11 aa, Homo sapiens
SLAPGDVVRQV

SEQ ID NO: 6543 - protein, 9 aa, Homo sapiens
SLAPPVTAV

SEQ ID NO: 6544 - protein, 9 aa, Homo sapiens
SLAPSITNV

SEQ ID NO: 6545 - protein, 9 aa, Homo sapiens
SLAQFEQKW

SEQ ID NO: 6546 - protein, 9 aa, Homo sapiens
SLAQVVMKV

SEQ ID NO: 6547 - protein, 9 aa, Homo sapiens
SLASQVVKL

SEQ ID NO: 6548 - protein, 9 aa, Homo sapiens
SLATPVVSV

SEQ ID NO: 6549 - protein, 11 aa, Homo sapiens
SLAVLGGKLYV

SEQ ID NO: 6550 - protein, 9 aa, Homo sapiens
SLCHVLPDL

SEQ ID NO: 6551 - protein, 10 aa, Homo sapiens
SLDDLTNLVV

SEQ ID NO: 6552 - protein, 9 aa, Homo sapiens
SLDDSISAA

SEQ ID NO: 6553 - protein, 9 aa, Homo sapiens
SLDEGIEQV

SEQ ID NO: 6554 - protein, 9 aa, Homo sapiens
SLDERPVAV

SEQ ID NO: 6555 - protein, 9 aa, Homo sapiens
SLDHKLAEV

SEQ ID NO: 6556 - protein, 10 aa, Homo sapiens
SLDPHAQVAV

SEQ ID NO: 6557 - protein, 9 aa, Homo sapiens
SLDQHVAAV

SEQ ID NO: 6558 - protein, 9 aa, Homo sapiens
SLDQKTPEA

SEQ ID NO: 6559 - protein, 9 aa, Homo sapiens
SLDRPHTVL

SEQ ID NO: 6560 - protein, 9 aa, Homo sapiens
SLEELLHYV

SEQ ID NO: 6561 - protein, 9 aa, Homo sapiens
SLFDARVHL

SEQ ID NO: 6562 - protein, 9 aa, Homo sapiens
SLFDLNFQA

SEQ ID NO: 6563 - protein, 9 aa, Homo sapiens
SLFDWNVKL

SEQ ID NO: 6564 - protein, 11 aa, Homo sapiens
SLFEDSDLLHA

SEQ ID NO: 6565 - protein, 9 aa, Homo sapiens
SLFEEMLQV

SEQ ID NO: 6566 - protein, 10 aa, Homo sapiens
SLFEGKALGL

SEQ ID NO: 6567 - protein, 11 aa, Homo sapiens
SLFGNIKGATI

SEQ ID NO: 6568 - protein, 10 aa, Homo sapiens
SLFGQDVKAV

SEQ ID NO: 6569 - protein, 10 aa, Homo sapiens
SLFGSPPTSV

SEQ ID NO: 6570 - protein, 9 aa, Homo sapiens
SLFKDQMEL

SEQ ID NO: 6571 - protein, 9 aa, Homo sapiens
SLFKELQEA

SEQ ID NO: 6572 - protein, 8 aa, Homo sapiens
SLFKIWLV

SEQ ID NO: 6573 - protein, 9 aa, Homo sapiens
SLFKLIVKV

SEQ ID NO: 6574 - protein, 9 aa, Homo sapiens
SLFPAELAL

SEQ ID NO: 6575 - protein, 9 aa, Homo sapiens
SLFPGQVVI

SEQ ID NO: 6576 - protein, 11 aa, Homo sapiens
SLFQGVEFHYV

SEQ ID NO: 6577 - protein, 9 aa, Homo sapiens
SLFQLAFLV

SEQ ID NO: 6578 - protein, 11 aa, Homo sapiens
SLFSDKQMIKL

SEQ ID NO: 6579 - protein, 11 aa, Homo sapiens
SLFSEETPVVL

SEQ ID NO: 6580 - protein, 10 aa, Homo sapiens
SLFSHSLISI

SEQ ID NO: 6581 - protein, 9 aa, Homo sapiens
SLFSMLHQA

SEQ ID NO: 6582 - protein, 9 aa, Homo sapiens
SLFSSPPEI

SEQ ID NO: 6583 - protein, 9 aa, Homo sapiens
SLFSVIVRV

SEQ ID NO: 6584 - protein, 9 aa, Homo sapiens
SLFSVLVRV

SEQ ID NO: 6585 - protein, 9 aa, Homo sapiens
SLGEEQFSV

SEQ ID NO: 6586 - protein, 9 aa, Homo sapiens
SLGEFHVRL

SEQ ID NO: 6587 - protein, 11 aa, Homo sapiens
SLGPSLATDKS

SEQ ID NO: 6588 - protein, 9 aa, Homo sapiens
SLHDISTEM

SEQ ID NO: 6589 - protein, 9 aa, Homo sapiens
SLHDRIYVI

SEQ ID NO: 6590 - protein, 9 aa, Homo sapiens
SLHEFLVNL

SEQ ID NO: 6591 - protein, 9 aa, Homo sapiens
SLHLHVPSV

SEQ ID NO: 6592 - protein, 9 aa, Homo sapiens
SLHSVIIQL

SEQ ID NO: 6593 - protein, 11 aa, Homo sapiens
SLIDDNNEINL

SEQ ID NO: 6594 - protein, 9 aa, Homo sapiens
SLIDKLYNI

SEQ ID NO: 6595 - protein, 11 aa, Homo sapiens
SLIDMRGIETV

SEQ ID NO: 6596 - protein, 9 aa, Homo sapiens
SLIDRTIKM

SEQ ID NO: 6597 - protein, 9 aa, Homo sapiens
SLIEHLQGL

SEQ ID NO: 6598 - protein, 9 aa, Homo sapiens
SLIEKPPIL

SEQ ID NO: 6599 - protein, 9 aa, Homo sapiens
SLIEKVTQL

SEQ ID NO: 6600 - protein, 9 aa, Homo sapiens
SLIERDLKL

SEQ ID NO: 6601 - protein, 9 aa, Homo sapiens
SLIERLYEI

SEQ ID NO: 6602 - protein, 9 aa, Homo sapiens
SLIFKLEEL

SEQ ID NO: 6603 - protein, 9 aa, Homo sapiens
SLIKQSAQL

SEQ ID NO: 6604 - protein, 9 aa, Homo sapiens
SLINFRVLL

SEQ ID NO: 6605 - protein, 11 aa, Homo sapiens
SLINVNDLSFV

SEQ ID NO: 6606 - protein, 9 aa, Homo sapiens
SLIPIISGV

SEQ ID NO: 6607 - protein, 9 aa, Homo sapiens
SLIQHLEEI

SEQ ID NO: 6608 - protein, 9 aa, Homo sapiens
SLIQKVDMV

SEQ ID NO: 6609 - protein, 9 aa, Homo sapiens
SLIRIVPVV

SEQ ID NO: 6610 - protein, 9 aa, Homo sapiens
SLISNPPAM

SEQ ID NO: 6611 - protein, 9 aa, Homo sapiens
SLITDLQTI

SEQ ID NO: 6612 - protein, 9 aa, Homo sapiens
SLITLIEKV

SEQ ID NO: 6613 - protein, 9 aa, Homo sapiens
SLKTPGTSL

SEQ ID NO: 6614 - protein, 9 aa, Homo sapiens
SLLAELEAI

SEQ ID NO: 6615 - protein, 9 aa, Homo sapiens
SLLASDHHL

SEQ ID NO: 6616 - protein, 10 aa, Homo sapiens
SLLDADIHSA

SEQ ID NO: 6617 - protein, 9 aa, Homo sapiens
SLLDCTFRL

SEQ ID NO: 6618 - protein, 11 aa, Homo sapiens
SLLDDSSLHLW

SEQ ID NO: 6619 - protein, 10 aa, Homo sapiens
SLLDEAIEAV

SEQ ID NO: 6620 - protein, 9 aa, Homo sapiens
SLLDEVLNV

SEQ ID NO: 6621 - protein, 9 aa, Homo sapiens
SLLDFERSL

SEQ ID NO: 6622 - protein, 11 aa, Homo sapiens
SLLDIIEKVMA

SEQ ID NO: 6623 - protein, 9 aa, Homo sapiens
SLLDLEQKL

SEQ ID NO: 6624 - protein, 10 aa, Homo sapiens
SLLDLGEVAL

SEQ ID NO: 6625 - protein, 9 aa, Homo sapiens
SLLDLPLSL

SEQ ID NO: 6626 - protein, 10 aa, Homo sapiens
SLLDMSLVKL

SEQ ID NO: 6627 - protein, 9 aa, Homo sapiens
SLLDPLPTA

SEQ ID NO: 6628 - protein, 9 aa, Homo sapiens
SLLDQIPEM

SEQ ID NO: 6629 - protein, 9 aa, Homo sapiens
SLLDVAVHM

SEQ ID NO: 6630 - protein, 9 aa, Homo sapiens
SLLEALDTI

SEQ ID NO: 6631 - protein, 9 aa, Homo sapiens
SLLEDLSHI

SEQ ID NO: 6632 - protein, 11 aa, Homo sapiens
SLLEEKLLPVL

SEQ ID NO: 6633 - protein, 9 aa, Homo sapiens
SLLEEKLVL

SEQ ID NO: 6634 - protein, 9 aa, Homo sapiens
SLLEILNSA

SEQ ID NO: 6635 - protein, 10 aa, Homo sapiens
SLLEKAGPEL

SEQ ID NO: 6636 - protein, 9 aa, Homo sapiens
SLLEKLSAL

SEQ ID NO: 6637 - protein, 9 aa, Homo sapiens
SLLEQLALE

SEQ ID NO: 6638 - protein, 10 aa, Homo sapiens
SLLERGLEAA

SEQ ID NO: 6639 - protein, 9 aa, Homo sapiens
SLLERLEKI

SEQ ID NO: 6640 - protein, 11 aa, Homo sapiens
SLLESSRSQEL

SEQ ID NO: 6641 - protein, 11 aa, Homo sapiens
SLLETGSDLLL

SEQ ID NO: 6642 - protein, 9 aa, Homo sapiens
SLLEYQMLV

SEQ ID NO: 6643 - protein, 10 aa, Homo sapiens
SLLGDMEWRL

SEQ ID NO: 6644 - protein, 9 aa, Homo sapiens
SLLGFVYKL

SEQ ID NO: 6645 - protein, 9 aa, Homo sapiens
SLLGHVIRL

SEQ ID NO: 6646 - protein, 10 aa, Homo sapiens
SLLGPPPVGV

SEQ ID NO: 6647 - protein, 9 aa, Homo sapiens
SLLGRSLEL

SEQ ID NO: 6648 - protein, 9 aa, Homo sapiens
SLLHVEQEV

SEQ ID NO: 6649 - protein, 9 aa, Homo sapiens
SLLKDLAEI

SEQ ID NO: 6650 - protein, 9 aa, Homo sapiens
SLLKEGYQL

SEQ ID NO: 6651 - protein, 9 aa, Homo sapiens
SLLLIPIHL

SEQ ID NO: 6652 - protein, 9 aa, Homo sapiens
SLLMSIHNI

SEQ ID NO: 6653 - protein, 9 aa, Homo sapiens
SLLNEIESI

SEQ ID NO: 6654 - protein, 9 aa, Homo sapiens
SLLNEIESV

SEQ ID NO: 6655 - protein, 10 aa, Homo sapiens
SLLNFVMPHM

SEQ ID NO: 6656 - protein, 9 aa, Homo sapiens
SLLNHLPYL

SEQ ID NO: 6657 - protein, 11 aa, Homo sapiens
SLLNPPETLNL

SEQ ID NO: 6658 - protein, 11 aa, Homo sapiens
SLLNQDLHWSL

SEQ ID NO: 6659 - protein, 9 aa, Homo sapiens
SLLNQPKAV

SEQ ID NO: 6660 - protein, 9 aa, Homo sapiens
SLLNTLAQI

SEQ ID NO: 6661 - protein, 10 aa, Homo sapiens
SLLPASLASI

SEQ ID NO: 6662 - protein, 11 aa, Homo sapiens
SLLPEYVVPYM

SEQ ID NO: 6663 - protein, 10 aa, Homo sapiens
SLLPGKLPTL

SEQ ID NO: 6664 - protein, 11 aa, Homo sapiens
SLLPGNLVEKV

SEQ ID NO: 6665 - protein, 11 aa, Homo sapiens
SLLPLASDPLL

SEQ ID NO: 6666 - protein, 11 aa, Homo sapiens
SLLPLDDIVRV

SEQ ID NO: 6667 - protein, 9 aa, Homo sapiens
SLLPLSHLV

SEQ ID NO: 6668 - protein, 9 aa, Homo sapiens
SLLPLVWKI

SEQ ID NO: 6669 - protein, 9 aa, Homo sapiens
SLLPQLTGA

SEQ ID NO: 6670 - protein, 11 aa, Homo sapiens
SLLPVDIRQYL

SEQ ID NO: 6671 - protein, 9 aa, Homo sapiens
SLLQALNEV

SEQ ID NO: 6672 - protein, 9 aa, Homo sapiens
SLLQHLIGL

SEQ ID NO: 6673 - protein, 9 aa, Homo sapiens
SLLQHVLLL

SEQ ID NO: 6674 - protein, 9 aa, Homo sapiens
SLLQQGEQL

SEQ ID NO: 6675 - protein, 9 aa, Homo sapiens
SLLQQLENV

SEQ ID NO: 6676 - protein, 11 aa, Homo sapiens
SLLSGALAGAL

SEQ ID NO: 6677 - protein, 9 aa, Homo sapiens
SLLSGLVRL

SEQ ID NO: 6678 - protein, 10 aa, Homo sapiens
SLLSGRISTL

SEQ ID NO: 6679 - protein, 9 aa, Homo sapiens
SLLSHDPRL

SEQ ID NO: 6680 - protein, 9 aa, Homo sapiens
SLLSSVFKL

SEQ ID NO: 6681 - protein, 11 aa, Homo sapiens
SLLSTDALPSA

SEQ ID NO: 6682 - protein, 9 aa, Homo sapiens
SLLSVSHAL

SEQ ID NO: 6683 - protein, 9 aa, Homo sapiens
SLLTAIHMV

SEQ ID NO: 6684 - protein, 9 aa, Homo sapiens
SLLTHIQNL

SEQ ID NO: 6685 - protein, 9 aa, Homo sapiens
SLLTSPPKA

SEQ ID NO: 6686 - protein, 9 aa, Homo sapiens
SLLTVIEKL

SEQ ID NO: 6687 - protein, 9 aa, Homo sapiens
SLLVHNVSV

SEQ ID NO: 6688 - protein, 9 aa, Homo sapiens
SLLYKVPYV

SEQ ID NO: 6689 - protein, 9 aa, Homo sapiens
SLMDDYLGL

SEQ ID NO: 6690 - protein, 9 aa, Homo sapiens
SLMDLQERL

SEQ ID NO: 6691 - protein, 9 aa, Homo sapiens
SLMDPDTKL

SEQ ID NO: 6692 - protein, 10 aa, Homo sapiens
SLMDPPGTAL

SEQ ID NO: 6693 - protein, 10 aa, Homo sapiens
SLMEDQVLQL

SEQ ID NO: 6694 - protein, 10 aa, Homo sapiens
SLMEEHGATL

SEQ ID NO: 6695 - protein, 11 aa, Homo sapiens
SLMEESGICKV

SEQ ID NO: 6696 - protein, 9 aa, Homo sapiens
SLMEKNQSL

SEQ ID NO: 6697 - protein, 11 aa, Homo sapiens
SLMEQLRGEAL

SEQ ID NO: 6698 - protein, 9 aa, Homo sapiens
SLMHVPPSL

SEQ ID NO: 6699 - protein, 9 aa, Homo sapiens
SLMNQNAQL

SEQ ID NO: 6700 - protein, 11 aa, Homo sapiens
SLMPHFKSMYL

SEQ ID NO: 6701 - protein, 9 aa, Homo sapiens
SLNELRVLL

SEQ ID NO: 6702 - protein, 9 aa, Homo sapiens
SLNEYQPKL

SEQ ID NO: 6703 - protein, 9 aa, Homo sapiens
SLNHLLNYV

SEQ ID NO: 6704 - protein, 9 aa, Homo sapiens
SLNKQIETV

SEQ ID NO: 6705 - protein, 9 aa, Homo sapiens
SLNKWIFTV

SEQ ID NO: 6706 - protein, 9 aa, Homo sapiens
SLNLAPPTV

SEQ ID NO: 6707 - protein, 9 aa, Homo sapiens
SLPELVHAV

SEQ ID NO: 6708 - protein, 9 aa, Homo sapiens
SLPENTVQV

SEQ ID NO: 6709 - protein, 11 aa, Homo sapiens
SLPESTLLQAV

SEQ ID NO: 6710 - protein, 11 aa, Homo sapiens
SLPGHAPGLSL

SEQ ID NO: 6711 - protein, 9 aa, Homo sapiens
SLPQNFANV

SEQ ID NO: 6712 - protein, 9 aa, Homo sapiens
SLPRFQVTL

SEQ ID NO: 6713 - protein, 9 aa, Homo sapiens
SLPRLLKVN

SEQ ID NO: 6714 - protein, 9 aa, Homo sapiens
SLPVITVSL

SEQ ID NO: 6715 - protein, 9 aa, Homo sapiens
SLQDHIEKI

SEQ ID NO: 6716 - protein, 9 aa, Homo sapiens
SLQDKAAEV

SEQ ID NO: 6717 - protein, 9 aa, Homo sapiens
SLQDLIEKV

SEQ ID NO: 6718 - protein, 11 aa, Homo sapiens
SLQDVVKGLFV

SEQ ID NO: 6719 - protein, 9 aa, Homo sapiens
SLQEAVQAA

SEQ ID NO: 6720 - protein, 9 aa, Homo sapiens
SLQEEQQQL

SEQ ID NO: 6721 - protein, 11 aa, Homo sapiens
SLQEFVKAFYL

SEQ ID NO: 6722 - protein, 9 aa, Homo sapiens
SLQEKPMEI

SEQ ID NO: 6723 - protein, 9 aa, Homo sapiens
SLQETIQSL

SEQ ID NO: 6724 - protein, 9 aa, Homo sapiens
SLQEVAMFL

SEQ ID NO: 6725 - protein, 9 aa, Homo sapiens
SLQNHQFEL

SEQ ID NO: 6726 - protein, 10 aa, Homo sapiens
SLQQALGKAE

SEQ ID NO: 6727 - protein, 9 aa, Homo sapiens
SLQQQLIHV

SEQ ID NO: 6728 - protein, 9 aa, Homo sapiens
SLQQRLEYI

SEQ ID NO: 6729 - protein, 9 aa, Homo sapiens
SLQVDNSLI

SEQ ID NO: 6730 - protein, 9 aa, Homo sapiens
SLREQLEGV

SEQ ID NO: 6731 - protein, 9 aa, Homo sapiens
SLRPQVSSI

SEQ ID NO: 6732 - protein, 9 aa, Homo sapiens
SLSDVTSTT

SEQ ID NO: 6733 - protein, 9 aa, Homo sapiens
SLSETNKGL

SEQ ID NO: 6734 - protein, 9 aa, Homo sapiens
SLSEYVSRM

SEQ ID NO: 6735 - protein, 9 aa, Homo sapiens
SLSGELREV

SEQ ID NO: 6736 - protein, 8 aa, Homo sapiens
SLSIVHSW

SEQ ID NO: 6737 - protein, 9 aa, Homo sapiens
SLSKITTTV

SEQ ID NO: 6738 - protein, 9 aa, Homo sapiens
SLSLAAMIR

SEQ ID NO: 6739 - protein, 9 aa, Homo sapiens
SLSNFIESV

SEQ ID NO: 6740 - protein, 10 aa, Homo sapiens
SLSPGALIAL

SEQ ID NO: 6741 - protein, 9 aa, Homo sapiens
SLSPTLVLN

SEQ ID NO: 6742 - protein, 10 aa, Homo sapiens
SLSQPPLQLR

SEQ ID NO: 6743 - protein, 9 aa, Homo sapiens
SLSQVFLHL

SEQ ID NO: 6744 - protein, 9 aa, Homo sapiens
SLSSVLSHV

SEQ ID NO: 6745 - protein, 11 aa, Homo sapiens
SLSTSVELPIT

SEQ ID NO: 6746 - protein, 10 aa, Homo sapiens
SLSVEGRRGP

SEQ ID NO: 6747 - protein, 10 aa, Homo sapiens
SLSWGQRKKL

SEQ ID NO: 6748 - protein, 9 aa, Homo sapiens
SLTEQVHSL

SEQ ID NO: 6749 - protein, 9 aa, Homo sapiens
SLTEYIHHL

SEQ ID NO: 6750 - protein, 9 aa, Homo sapiens
SLTGVQQQL

SEQ ID NO: 6751 - protein, 9 aa, Homo sapiens
SLTRHQFYL

SEQ ID NO: 6752 - protein, 10 aa, Homo sapiens
SLTVDGIMFV

SEQ ID NO: 6753 - protein, 10 aa, Homo sapiens
SLVAVELEKV

SEQ ID NO: 6754 - protein, 10 aa, Homo sapiens
SLVDALLEQV

SEQ ID NO: 6755 - protein, 9 aa, Homo sapiens
SLVDQSAAL

SEQ ID NO: 6756 - protein, 10 aa, Homo sapiens
SLVEFHLKEL

SEQ ID NO: 6757 - protein, 9 aa, Homo sapiens
SLVEIILHV

SEQ ID NO: 6758 - protein, 9 aa, Homo sapiens
SLVENIERL

SEQ ID NO: 6759 - protein, 8 aa, Homo sapiens
SLVGILHL

SEQ ID NO: 6760 - protein, 8 aa, Homo sapiens
SLVINIAA

SEQ ID NO: 6761 - protein, 9 aa, Homo sapiens
SLVKSTSQL

SEQ ID NO: 6762 - protein, 9 aa, Homo sapiens
SLVNVVPKL

SEQ ID NO: 6763 - protein, 9 aa, Homo sapiens
SLVPNRGIL

SEQ ID NO: 6764 - protein, 9 aa, Homo sapiens
SLVQANPEV

SEQ ID NO: 6765 - protein, 9 aa, Homo sapiens
SLVQELKAV

SEQ ID NO: 6766 - protein, 10 aa, Homo sapiens
SLVQGELVTA

SEQ ID NO: 6767 - protein, 9 aa, Homo sapiens
SLVQIVTTL

SEQ ID NO: 6768 - protein, 9 aa, Homo sapiens
SLVQRVETI

SEQ ID NO: 6769 - protein, 9 aa, Homo sapiens
SLVTKVTAV

SEQ ID NO: 6770 - protein, 11 aa, Homo sapiens
SLWEISKQIEG

SEQ ID NO: 6771 - protein, 9 aa, Homo sapiens
SLWEKALKL

SEQ ID NO: 6772 - protein, 10 aa, Homo sapiens
SLWERVSTHV

SEQ ID NO: 6773 - protein, 9 aa, Homo sapiens
SLWETVARA

SEQ ID NO: 6774 - protein, 9 aa, Homo sapiens
SLWKEVSEL

SEQ ID NO: 6775 - protein, 11 aa, Homo sapiens
SLWSLTHLTAL

SEQ ID NO: 6776 - protein, 9 aa, Homo sapiens
SLWSLYPRA

SEQ ID NO: 6777 - protein, 9 aa, Homo sapiens
SLYASPSMV

SEQ ID NO: 6778 - protein, 10 aa, Homo sapiens
SLYDVSRMYV

SEQ ID NO: 6779 - protein, 9 aa, Homo sapiens
SLYEENNKL

SEQ ID NO: 6780 - protein, 11 aa, Homo sapiens
SLYGYGSTVRL

SEQ ID NO: 6781 - protein, 9 aa, Homo sapiens
SLYNALQSL

SEQ ID NO: 6782 - protein, 9 aa, Homo sapiens
SLYNSLETA

SEQ ID NO: 6783 - protein, 10 aa, Homo sapiens
SLYPSAPFLA

SEQ ID NO: 6784 - protein, 9 aa, Homo sapiens
SLYPSIMMA

SEQ ID NO: 6785 - protein, 9 aa, Homo sapiens
SLYSALQQA

SEQ ID NO: 6786 - protein, 10 aa, Homo sapiens
SLYSGLLERL

SEQ ID NO: 6787 - protein, 9 aa, Homo sapiens
SLYTRTLYL

SEQ ID NO: 6788 - protein, 9 aa, Homo sapiens
SMAELDIKL

SEQ ID NO: 6789 - protein, 11 aa, Homo sapiens
SMAEVDAAMAA

SEQ ID NO: 6790 - protein, 9 aa, Homo sapiens
SMAKAITGV

SEQ ID NO: 6791 - protein, 9 aa, Homo sapiens
SMAPYVLNV

SEQ ID NO: 6792 - protein, 9 aa, Homo sapiens
SMAVVIPEA

SEQ ID NO: 6793 - protein, 9 aa, Homo sapiens
SMISKLKQA

SEQ ID NO: 6794 - protein, 9 aa, Homo sapiens
SMLPVPPAV

SEQ ID NO: 6795 - protein, 9 aa, Homo sapiens
SMVDVVMLL

SEQ ID NO: 6796 - protein, 9 aa, Homo sapiens
SMWDDINNV

SEQ ID NO: 6797 - protein, 10 aa, Homo sapiens
SMYGVDLHHA

SEQ ID NO: 6798 - protein, 9 aa, Homo sapiens
STAPPVHNV

SEQ ID NO: 6799 - protein, 11 aa, Homo sapiens
STFDHPELVKL

SEQ ID NO: 6800 - protein, 9 aa, Homo sapiens
SVAGSVERV

SEQ ID NO: 6801 - protein, 9 aa, Homo sapiens
SVIDHIHLI

SEQ ID NO: 6802 - protein, 11 aa, Homo sapiens
SVIDHIHLISV

SEQ ID NO: 6803 - protein, 9 aa, Homo sapiens
SVIGFRILL

SEQ ID NO: 6804 - protein, 9 aa, Homo sapiens
SVLDQKILL

SEQ ID NO: 6805 - protein, 9 aa, Homo sapiens
SVLVSPPAV

SEQ ID NO: 6806 - protein, 9 aa, Homo sapiens
SVMKVKAEL

SEQ ID NO: 6807 - protein, 9 aa, Homo sapiens
SVMSILPKI

SEQ ID NO: 6808 - protein, 10 aa, Homo sapiens
TILPEQLEIL

SEQ ID NO: 6809 - protein, 9 aa, Homo sapiens
TLADYLHLL

SEQ ID NO: 6810 - protein, 10 aa, Homo sapiens
TLAEIAKAEL

SEQ ID NO: 6811 - protein, 11 aa, Homo sapiens
TLAEINQKWNL

SEQ ID NO: 6812 - protein, 9 aa, Homo sapiens
TLAEKIQTI

SEQ ID NO: 6813 - protein, 11 aa, Homo sapiens
TLAEKIQTIIL

SEQ ID NO: 6814 - protein, 10 aa, Homo sapiens
TLAELQNNMV

SEQ ID NO: 6815 - protein, 9 aa, Homo sapiens
TLAGDVHIV

SEQ ID NO: 6816 - protein, 9 aa, Homo sapiens
TLAGLVVQL

SEQ ID NO: 6817 - protein, 9 aa, Homo sapiens
TLANIFAGV

SEQ ID NO: 6818 - protein, 11 aa, Homo sapiens
TLAPGEVLRSV

SEQ ID NO: 6819 - protein, 9 aa, Homo sapiens
TLAPQPSSV

SEQ ID NO: 6820 - protein, 9 aa, Homo sapiens
TLAQQPTAV

SEQ ID NO: 6821 - protein, 10 aa, Homo sapiens
TLASNAIILI

SEQ ID NO: 6822 - protein, 10 aa, Homo sapiens
TLATDILMGV

SEQ ID NO: 6823 - protein, 9 aa, Homo sapiens
TLDDLLLYI

SEQ ID NO: 6824 - protein, 9 aa, Homo sapiens
TLDENHPSI

SEQ ID NO: 6825 - protein, 9 aa, Homo sapiens
TLDPNVTGV

SEQ ID NO: 6826 - protein, 9 aa, Homo sapiens
TLDPVEKAL

SEQ ID NO: 6827 - protein, 9 aa, Homo sapiens
TLDQKIERV

SEQ ID NO: 6828 - protein, 9 aa, Homo sapiens
TLFDYDVGL

SEQ ID NO: 6829 - protein, 9 aa, Homo sapiens
TLFGDVAMV

SEQ ID NO: 6830 - protein, 9 aa, Homo sapiens
TLFLWKIEV

SEQ ID NO: 6831 - protein, 9 aa, Homo sapiens
TLFQGIKTV

SEQ ID NO: 6832 - protein, 9 aa, Homo sapiens
TLFYSLREV

SEQ ID NO: 6833 - protein, 9 aa, Homo sapiens
TLGVIPESV

SEQ ID NO: 6834 - protein, 9 aa, Homo sapiens
TLHSIIISL

SEQ ID NO: 6835 - protein, 10 aa, Homo sapiens
TLIAGPVVEI

SEQ ID NO: 6836 - protein, 9 aa, Homo sapiens
TLIEELKAL

SEQ ID NO: 6837 - protein, 9 aa, Homo sapiens
TLIEESAKV

SEQ ID NO: 6838 - protein, 10 aa, Homo sapiens
TLIEFLLHRA

SEQ ID NO: 6839 - protein, 9 aa, Homo sapiens
TLIEKVQEA

SEQ ID NO: 6840 - protein, 11 aa, Homo sapiens
TLIGEDVNPLI

SEQ ID NO: 6841 - protein, 10 aa, Homo sapiens
TLIGGLLLHV

SEQ ID NO: 6842 - protein, 10 aa, Homo sapiens
TLIKGKIEEV

SEQ ID NO: 6843 - protein, 8 aa, Homo sapiens
TLILANIL

SEQ ID NO: 6844 - protein, 9 aa, Homo sapiens
TLINLLLKV

SEQ ID NO: 6845 - protein, 9 aa, Homo sapiens
TLIQFTVKL

SEQ ID NO: 6846 - protein, 9 aa, Homo sapiens
TLIQRTYGL

SEQ ID NO: 6847 - protein, 11 aa, Homo sapiens
TLIQYIRPVFV

SEQ ID NO: 6848 - protein, 11 aa, Homo sapiens
TLIRSDAVALV

SEQ ID NO: 6849 - protein, 9 aa, Homo sapiens
TLISTAHTL

SEQ ID NO: 6850 - protein, 11 aa, Homo sapiens
TLLADQGEIRV

SEQ ID NO: 6851 - protein, 9 aa, Homo sapiens
TLLAFLVEL

SEQ ID NO: 6852 - protein, 9 aa, Homo sapiens
TLLDFINAV

SEQ ID NO: 6853 - protein, 10 aa, Homo sapiens
TLLDGKLVLL

SEQ ID NO: 6854 - protein, 11 aa, Homo sapiens
TLLDNTDTISI

SEQ ID NO: 6855 - protein, 11 aa, Homo sapiens
TLLEADILNTV

SEQ ID NO: 6856 - protein, 9 aa, Homo sapiens
TLLEEIKAL

SEQ ID NO: 6857 - protein, 9 aa, Homo sapiens
TLLEEIRDL

SEQ ID NO: 6858 - protein, 11 aa, Homo sapiens
TLLEEIRDLAL

SEQ ID NO: 6859 - protein, 9 aa, Homo sapiens
TLLETEMLL

SEQ ID NO: 6860 - protein, 9 aa, Homo sapiens
TLLGDVVRL

SEQ ID NO: 6861 - protein, 9 aa, Homo sapiens
TLLGKVVAL

SEQ ID NO: 6862 - protein, 9 aa, Homo sapiens
TLLGNIHAV

SEQ ID NO: 6863 - protein, 9 aa, Homo sapiens
TLLHFLAEL

SEQ ID NO: 6864 - protein, 9 aa, Homo sapiens
TLLHRFWNL

SEQ ID NO: 6865 - protein, 10 aa, Homo sapiens
TLLIGSPLSL

SEQ ID NO: 6866 - protein, 9 aa, Homo sapiens
TLLKQLPCI

SEQ ID NO: 6867 - protein, 9 aa, Homo sapiens
TLLKSIPLV

SEQ ID NO: 6868 - protein, 9 aa, Homo sapiens
TLLLHTWLL

SEQ ID NO: 6869 - protein, 9 aa, Homo sapiens
TLLNKLYVI

SEQ ID NO: 6870 - protein, 9 aa, Homo sapiens
TLLTAIVKL

SEQ ID NO: 6871 - protein, 9 aa, Homo sapiens
TLLTDPPTA

SEQ ID NO: 6872 - protein, 9 aa, Homo sapiens
TLLTFFHEL

SEQ ID NO: 6873 - protein, 9 aa, Homo sapiens
TLLTKPVEI

SEQ ID NO: 6874 - protein, 9 aa, Homo sapiens
TLLYLDLNL

SEQ ID NO: 6875 - protein, 9 aa, Homo sapiens
TLMAFHVFL

SEQ ID NO: 6876 - protein, 10 aa, Homo sapiens
TLMDMRLSQV

SEQ ID NO: 6877 - protein, 11 aa, Artificial Sequence
  unidentified
VLELDSPGSLV

SEQ ID NO: 6878 - protein, 11 aa, Artificial Sequence
  unidentified
YLIKGKAPEEI

SEQ ID NO: 6879 - protein, 9 aa, Homo sapiens
TLIQFTVKL

SEQ ID NO: 6880 - protein, 9 aa, Homo sapiens
TLIQRTYGL

SEQ ID NO: 6881 - protein, 11 aa, Homo sapiens
TLIQYIRPVFV

SEQ ID NO: 6882 - protein, 11 aa, Homo sapiens
TLIRSDAVALV

SEQ ID NO: 6883 - protein, 9 aa, Homo sapiens
TLISTAHTL

SEQ ID NO: 6884 - protein, 11 aa, Homo sapiens
TLLADQGEIRV

SEQ ID NO: 6885 - protein, 9 aa, Homo sapiens
TLLAFLVEL

SEQ ID NO: 6886 - protein, 9 aa, Homo sapiens
TLLDFINAV

SEQ ID NO: 6887 - protein, 10 aa, Homo sapiens
TLLDGKLVLL

SEQ ID NO: 6888 - protein, 11 aa, Homo sapiens
TLLDNTDTISI

SEQ ID NO: 6889 - protein, 11 aa, Homo sapiens
TLLEADILNTV

SEQ ID NO: 6890 - protein, 9 aa, Homo sapiens
TLLEEIKAL

SEQ ID NO: 6891 - protein, 9 aa, Homo sapiens
TLLEEIRDL

SEQ ID NO: 6892 - protein, 11 aa, Homo sapiens
TLLEEIRDLAL

SEQ ID NO: 6893 - protein, 9 aa, Homo sapiens
TLLETEMLL

SEQ ID NO: 6894 - protein, 9 aa, Homo sapiens
TLLGDVVRL

SEQ ID NO: 6895 - protein, 9 aa, Homo sapiens
TLLGKVVAL

SEQ ID NO: 6896 - protein, 9 aa, Homo sapiens
TLLGNIHAV

SEQ ID NO: 6897 - protein, 9 aa, Homo sapiens
TLLHFLAEL

SEQ ID NO: 6898 - protein, 9 aa, Homo sapiens
TLLHRFWNL

SEQ ID NO: 6899 - protein, 10 aa, Homo sapiens
TLLIGSPLSL

SEQ ID NO: 6900 - protein, 9 aa, Homo sapiens
TLLKQLPCI

SEQ ID NO: 6901 - protein, 9 aa, Homo sapiens
TLLKSIPLV

SEQ ID NO: 6902 - protein, 9 aa, Homo sapiens
TLLLHTWLL

SEQ ID NO: 6903 - protein, 9 aa, Homo sapiens
TLLNKLYVI

SEQ ID NO: 6904 - protein, 9 aa, Homo sapiens
TLLTAIVKL

SEQ ID NO: 6905 - protein, 9 aa, Homo sapiens
TLLTDPPTA

SEQ ID NO: 6906 - protein, 9 aa, Homo sapiens
TLLTFFHEL

SEQ ID NO: 6907 - protein, 9 aa, Homo sapiens
TLLTKPVEI

SEQ ID NO: 6908 - protein, 9 aa, Homo sapiens
TLLYLDLNL

SEQ ID NO: 6909 - protein, 9 aa, Homo sapiens
TLMAFHVFL

SEQ ID NO: 6910 - protein, 10 aa, Homo sapiens
TLMDMRLSQV

SEQ ID NO: 6911 - protein, 10 aa, Homo sapiens
TLMEQAVAAV

SEQ ID NO: 6912 - protein, 10 aa, Homo sapiens
TLMEQPLTTL

SEQ ID NO: 6913 - protein, 11 aa, Homo sapiens
TLMESNKLETI

SEQ ID NO: 6914 - protein, 9 aa, Homo sapiens
TLMEVMPKI

SEQ ID NO: 6915 - protein, 10 aa, Homo sapiens
TLMNLGGLAV

SEQ ID NO: 6916 - protein, 9 aa, Homo sapiens
TLMNLHVYI

SEQ ID NO: 6917 - protein, 8 aa, Homo sapiens
TLNNIKQF

SEQ ID NO: 6918 - protein, 9 aa, Homo sapiens
TLNSAAVTV

SEQ ID NO: 6919 - protein, 10 aa, Homo sapiens
TLPGPPKITL

SEQ ID NO: 6920 - protein, 9 aa, Homo sapiens
TLQAAMPQV

SEQ ID NO: 6921 - protein, 9 aa, Homo sapiens
TLQALVSSV

SEQ ID NO: 6922 - protein, 9 aa, Homo sapiens
TLQDIVYKL

SEQ ID NO: 6923 - protein, 9 aa, Homo sapiens
TLQEFLERI

SEQ ID NO: 6924 - protein, 9 aa, Homo sapiens
TLQEVVTGV

SEQ ID NO: 6925 - protein, 9 aa, Homo sapiens
TLQHIVTLL

SEQ ID NO: 6926 - protein, 10 aa, Homo sapiens
TLQTVPLTTV

SEQ ID NO: 6927 - protein, 10 aa, Homo sapiens
TLRLWDVLIL

SEQ ID NO: 6928 - protein, 9 aa, Homo sapiens
TLSDVLDRV

SEQ ID NO: 6929 - protein, 9 aa, Homo sapiens
TLSQAIVKV

SEQ ID NO: 6930 - protein, 9 aa, Homo sapiens
TLTELRAFL

SEQ ID NO: 6931 - protein, 10 aa, Homo sapiens
TLTGNLFIII

SEQ ID NO: 6932 - protein, 9 aa, Homo sapiens
TLTKVLALV

SEQ ID NO: 6933 - protein, 9 aa, Homo sapiens
TLTSKLYSL

SEQ ID NO: 6934 - protein, 11 aa, Homo sapiens
TLVDNISTMAL

SEQ ID NO: 6935 - protein, 9 aa, Homo sapiens
TLVDNTINL

SEQ ID NO: 6936 - protein, 9 aa, Homo sapiens
TLVEAIKQV

SEQ ID NO: 6937 - protein, 9 aa, Homo sapiens
TLVESLLTI

SEQ ID NO: 6938 - protein, 9 aa, Homo sapiens
TLVVFAINL

SEQ ID NO: 6939 - protein, 10 aa, Homo sapiens
TLWEIAKAEV

SEQ ID NO: 6940 - protein, 9 aa, Homo sapiens
TLWGGLLRL

SEQ ID NO: 6941 - protein, 9 aa, Homo sapiens
TLWNEIERL

SEQ ID NO: 6942 - protein, 9 aa, Homo sapiens
TLWNQELYI

SEQ ID NO: 6943 - protein, 8 aa, Homo sapiens
TLWVDPYE

SEQ ID NO: 6944 - protein, 9 aa, Homo sapiens
TLWYRSPEV

SEQ ID NO: 6945 - protein, 9 aa, Homo sapiens
TLYDIRAEL

SEQ ID NO: 6946 - protein, 9 aa, Homo sapiens
TLYDSRLFV

SEQ ID NO: 6947 - protein, 10 aa, Homo sapiens
TLYEGEKFQL

SEQ ID NO: 6948 - protein, 9 aa, Homo sapiens
TLYEQSVWI

SEQ ID NO: 6949 - protein, 10 aa, Homo sapiens
TLYERGFENI

SEQ ID NO: 6950 - protein, 9 aa, Homo sapiens
TLYGSQIKL

SEQ ID NO: 6951 - protein, 9 aa, Homo sapiens
TLYHLRLLV

SEQ ID NO: 6952 - protein, 9 aa, Homo sapiens
TLYILALEN

SEQ ID NO: 6953 - protein, 11 aa, Homo sapiens
TLYKDVRDLLA

SEQ ID NO: 6954 - protein, 11 aa, Homo sapiens
TLYNPERTITV

SEQ ID NO: 6955 - protein, 10 aa, Homo sapiens
TLYPLHILFV

SEQ ID NO: 6956 - protein, 9 aa, Homo sapiens
TMADQIVTV

SEQ ID NO: 6957 - protein, 9 aa, Homo sapiens
TMFEFAFHL

SEQ ID NO: 6958 - protein, 11 aa, Homo sapiens
TMIDDEALKEV

SEQ ID NO: 6959 - protein, 9 aa, Homo sapiens
TMLGVSHVV

SEQ ID NO: 6960 - protein, 10 aa, Homo sapiens
TMLHLTDIQL

SEQ ID NO: 6961 - protein, 9 aa, Homo sapiens
TQILSVPKV

SEQ ID NO: 6962 - protein, 9 aa, Homo sapiens
TTFDKEFLL

SEQ ID NO: 6963 - protein, 9 aa, Homo sapiens
TTLEQPPSV

SEQ ID NO: 6964 - protein, 8 aa, Homo sapiens
TVVNIVGV

SEQ ID NO: 6965 - protein, 9 aa, Homo sapiens
VIDKLVVHL

SEQ ID NO: 6966 - protein, 9 aa, Homo sapiens
VIFQKVVNV

SEQ ID NO: 6967 - protein, 9 aa, Homo sapiens
VIHNLATYV

SEQ ID NO: 6968 - protein, 9 aa, Homo sapiens
VIINQIYEA

SEQ ID NO: 6969 - protein, 9 aa, Homo sapiens
VIMERLQQV

SEQ ID NO: 6970 - protein, 9 aa, Homo sapiens
VINNVLATI

SEQ ID NO: 6971 - protein, 9 aa, Homo sapiens
VITETVVEV

SEQ ID NO: 6972 - protein, 9 aa, Homo sapiens
VLADSVHLA

SEQ ID NO: 6973 - protein, 9 aa, Homo sapiens
VLADVKVHI

SEQ ID NO: 6974 - protein, 10 aa, Homo sapiens
VLADVMDDQL

SEQ ID NO: 6975 - protein, 11 aa, Homo sapiens
VLAEDEEMNRM

SEQ ID NO: 6976 - protein, 9 aa, Homo sapiens
VLAELKEYA

SEQ ID NO: 6977 - protein, 9 aa, Homo sapiens
VLAELVAKL

SEQ ID NO: 6978 - protein, 9 aa, Homo sapiens
VLAFENPQV

SEQ ID NO: 6979 - protein, 9 aa, Homo sapiens
VLAFLVHEL

SEQ ID NO: 6980 - protein, 9 aa, Homo sapiens
VLAKEIGLL

SEQ ID NO: 6981 - protein, 11 aa, Homo sapiens
VLAPGHAVPPA

SEQ ID NO: 6982 - protein, 11 aa, Homo sapiens
VLAPVPTHSTV

SEQ ID NO: 6983 - protein, 11 aa, Homo sapiens
VLAQPEAISTI

SEQ ID NO: 6984 - protein, 9 aa, Homo sapiens
VLAQQIATL

SEQ ID NO: 6985 - protein, 9 aa, Homo sapiens
VLAQVFTEL

SEQ ID NO: 6986 - protein, 9 aa, Homo sapiens
VLASLIIRL

SEQ ID NO: 6987 - protein, 9 aa, Homo sapiens
VLATFVHML

SEQ ID NO: 6988 - protein, 10 aa, Homo sapiens
VLAVGIDGAN

SEQ ID NO: 6989 - protein, 10 aa, Homo sapiens
VLDDNKLLTL

SEQ ID NO: 6990 - protein, 10 aa, Homo sapiens
VLDELKNMKC

SEQ ID NO: 6991 - protein, 9 aa, Homo sapiens
VLDITRLLL

SEQ ID NO: 6992 - protein, 9 aa, Homo sapiens
VLDKLLLYL

SEQ ID NO: 6993 - protein, 9 aa, Homo sapiens
VLDMAKVLL

SEQ ID NO: 6994 - protein, 8 aa, Homo sapiens
VLDPRDII

SEQ ID NO: 6995 - protein, 11 aa, Homo sapiens
VLDTLSQLLKV

SEQ ID NO: 6996 - protein, 10 aa, Homo sapiens
VLDTLTKVLV

SEQ ID NO: 6997 - protein, 9 aa, Homo sapiens
VLDTPPDPA

SEQ ID NO: 6998 - protein, 9 aa, Homo sapiens
VLEDPVHAV

SEQ ID NO: 6999 - protein, 9 aa, Homo sapiens
VLEHFALLL

SEQ ID NO: 7000 - protein, 9 aa, Homo sapiens
VLESSNPKM

SEQ ID NO: 7001 - protein, 11 aa, Homo sapiens
VLFDVTGQVRL

SEQ ID NO: 7002 - protein, 10 aa, Homo sapiens
VLFESEFVHV

SEQ ID NO: 7003 - protein, 10 aa, Homo sapiens
VLFGAVITGA

SEQ ID NO: 7004 - protein, 9 aa, Homo sapiens
VLFPLLTKL

SEQ ID NO: 7005 - protein, 9 aa, Homo sapiens
VLFPLPTPL

SEQ ID NO: 7006 - protein, 11 aa, Homo sapiens
VLFPSAEVALL

SEQ ID NO: 7007 - protein, 10 aa, Homo sapiens
VLFQEALWHV

SEQ ID NO: 7008 - protein, 9 aa, Homo sapiens
VLFSSPPQM

SEQ ID NO: 7009 - protein, 9 aa, Homo sapiens
VLGEFLKEI

SEQ ID NO: 7010 - protein, 9 aa, Homo sapiens
VLGELVPRL

SEQ ID NO: 7011 - protein, 8 aa, Homo sapiens
VLGIVVGV

SEQ ID NO: 7012 - protein, 9 aa, Homo sapiens
VLGPGPPPL

SEQ ID NO: 7013 - protein, 9 aa, Homo sapiens
VLHDRIVSV

SEQ ID NO: 7014 - protein, 9 aa, Homo sapiens
VLHGQEISV

SEQ ID NO: 7015 - protein, 9 aa, Homo sapiens
VLHHTLTNV

SEQ ID NO: 7016 - protein, 10 aa, Homo sapiens
VLHPGLLAQV

SEQ ID NO: 7017 - protein, 9 aa, Homo sapiens
VLHRNLIYL

SEQ ID NO: 7018 - protein, 9 aa, Homo sapiens
VLIDDLTTL

SEQ ID NO: 7019 - protein, 11 aa, Homo sapiens
VLIDELHGLLL

SEQ ID NO: 7020 - protein, 9 aa, Homo sapiens
VLIDEVESL

SEQ ID NO: 7021 - protein, 10 aa, Homo sapiens
VLIDKLLPKL

SEQ ID NO: 7022 - protein, 11 aa, Homo sapiens
VLIDTPGQIEV

SEQ ID NO: 7023 - protein, 11 aa, Homo sapiens
VLIDVGTGYYV

SEQ ID NO: 7024 - protein, 9 aa, Homo sapiens
VLIETLVTL

SEQ ID NO: 7025 - protein, 9 aa, Homo sapiens
VLIEVNPQT

SEQ ID NO: 7026 - protein, 11 aa, Homo sapiens
VLIGEGVLTKL

SEQ ID NO: 7027 - protein, 9 aa, Homo sapiens
VLIGENEKA

SEQ ID NO: 7028 - protein, 10 aa, Homo sapiens
VLIGTFIAHV

SEQ ID NO: 7029 - protein, 11 aa, Homo sapiens
VLIGVGKLLRV

SEQ ID NO: 7030 - protein, 9 aa, Homo sapiens
VLIHELAEA

SEQ ID NO: 7031 - protein, 9 aa, Homo sapiens
VLIKDLFHI

SEQ ID NO: 7032 - protein, 10 aa, Homo sapiens
VLIKEGGVQL

SEQ ID NO: 7033 - protein, 10 aa, Homo sapiens
VLIKNLLISV

SEQ ID NO: 7034 - protein, 9 aa, Homo sapiens
VLIKWFPEV

SEQ ID NO: 7035 - protein, 9 aa, Homo sapiens
VLINRIDLV

SEQ ID NO: 7036 - protein, 9 aa, Homo sapiens
VLINTSVTL

SEQ ID NO: 7037 - protein, 8 aa, Homo sapiens
VLIPDQKY

SEQ ID NO: 7038 - protein, 10 aa, Homo sapiens
VLIRDLNFEV

SEQ ID NO: 7039 - protein, 9 aa, Homo sapiens
VLIRELWNT

SEQ ID NO: 7040 - protein, 10 aa, Homo sapiens
VLISGVVHEI

SEQ ID NO: 7041 - protein, 9 aa, Homo sapiens
VLISTLQEL

SEQ ID NO: 7042 - protein, 9 aa, Homo sapiens
VLISVLQAI

SEQ ID NO: 7043 - protein, 9 aa, Homo sapiens
VLITTLITA

SEQ ID NO: 7044 - protein, 9 aa, Homo sapiens
VLKAALADV

SEQ ID NO: 7045 - protein, 9 aa, Homo sapiens
VLKAEALAL

SEQ ID NO: 7046 - protein, 11 aa, Homo sapiens
VLLDADGHIKL

SEQ ID NO: 7047 - protein, 11 aa, Homo sapiens
VLLDENLLKMV

SEQ ID NO: 7048 - protein, 9 aa, Homo sapiens
VLLDITPMM

SEQ ID NO: 7049 - protein, 11 aa, Homo sapiens
VLLDSEGHIVL

SEQ ID NO: 7050 - protein, 11 aa, Homo sapiens
VLLEALALRNV

SEQ ID NO: 7051 - protein, 10 aa, Homo sapiens
VLLEAQDMAV

SEQ ID NO: 7052 - protein, 11 aa, Homo sapiens
VLLEDGVLNHV

SEQ ID NO: 7053 - protein, 11 aa, Homo sapiens
VLLEEGEAQRL

SEQ ID NO: 7054 - protein, 9 aa, Homo sapiens
VLLELLPRL

SEQ ID NO: 7055 - protein, 10 aa, Homo sapiens
VLLEPFIHQV

SEQ ID NO: 7056 - protein, 10 aa, Homo sapiens
VLLEPFVHQV

SEQ ID NO: 7057 - protein, 9 aa, Homo sapiens
VLLESKILL

SEQ ID NO: 7058 - protein, 11 aa, Homo sapiens
VLLFEADTITL

SEQ ID NO: 7059 - protein, 10 aa, Homo sapiens
VLLGHLLMEL

SEQ ID NO: 7060 - protein, 9 aa, Homo sapiens
VLLHLLHNV

SEQ ID NO: 7061 - protein, 9 aa, Homo sapiens
VLLKIVEQI

SEQ ID NO: 7062 - protein, 9 aa, Homo sapiens
VLLLNPVEV

SEQ ID NO: 7063 - protein, 9 aa, Homo sapiens
VLLLQPKIP

SEQ ID NO: 7064 - protein, 10 aa, Homo sapiens
VLLNEILEQV

SEQ ID NO: 7065 - protein, 9 aa, Homo sapiens
VLLNNKLYV

SEQ ID NO: 7066 - protein, 8 aa, Homo sapiens
VLLNPEKY

SEQ ID NO: 7067 - protein, 11 aa, Homo sapiens
VLLPDERTISL

SEQ ID NO: 7068 - protein, 9 aa, Homo sapiens
VLLPEHSLV

SEQ ID NO: 7069 - protein, 9 aa, Homo sapiens
VLLPELPTL

SEQ ID NO: 7070 - protein, 9 aa, Homo sapiens
VLLPLRVTL

SEQ ID NO: 7071 - protein, 9 aa, Homo sapiens
VLLSEILHL

SEQ ID NO: 7072 - protein, 11 aa, Homo sapiens
VLLSEQGDVKL

SEQ ID NO: 7073 - protein, 11 aa, Homo sapiens
VLLSHPDPLHL

SEQ ID NO: 7074 - protein, 9 aa, Homo sapiens
VLLSPVPEL

SEQ ID NO: 7075 - protein, 9 aa, Homo sapiens
VLLTMIARV

SEQ ID NO: 7076 - protein, 9 aa, Homo sapiens
VLLTVLERV

SEQ ID NO: 7077 - protein, 9 aa, Homo sapiens
VLLTWKYLL

SEQ ID NO: 7078 - protein, 11 aa, Homo sapiens
VLLVEHALSKV

SEQ ID NO: 7079 - protein, 11 aa, Homo sapiens
VLMDEGAVLTL

SEQ ID NO: 7080 - protein, 9 aa, Homo sapiens
VLMDGSVKL

SEQ ID NO: 7081 - protein, 10 aa, Homo sapiens
VLMDGSVKLV

SEQ ID NO: 7082 - protein, 9 aa, Homo sapiens
VLMDLKALL

SEQ ID NO: 7083 - protein, 10 aa, Homo sapiens
VLMDLKALLL

SEQ ID NO: 7084 - protein, 10 aa, Homo sapiens
VLMEGVKTEV

SEQ ID NO: 7085 - protein, 9 aa, Homo sapiens
VLMKALEYL

SEQ ID NO: 7086 - protein, 9 aa, Homo sapiens
VLMNQPPQI

SEQ ID NO: 7087 - protein, 9 aa, Homo sapiens
VLMNSLERL

SEQ ID NO: 7088 - protein, 11 aa, Homo sapiens
VLMPMERQMSV

SEQ ID NO: 7089 - protein, 9 aa, Homo sapiens
VLMQDLAFL

SEQ ID NO: 7090 - protein, 9 aa, Homo sapiens
VLMWEIYSL

SEQ ID NO: 7091 - protein, 9 aa, Homo sapiens
VLNKEAVEV

SEQ ID NO: 7092 - protein, 9 aa, Homo sapiens
VLPPDTDPA

SEQ ID NO: 7093 - protein, 9 aa, Homo sapiens
VLPSSLISI

SEQ ID NO: 7094 - protein, 10 aa, Homo sapiens
VLQDKDLFSV

SEQ ID NO: 7095 - protein, 9 aa, Homo sapiens
VLQDTVEQL

SEQ ID NO: 7096 - protein, 10 aa, Homo sapiens
VLQDYIILPT

SEQ ID NO: 7097 - protein, 9 aa, Homo sapiens
VLQGLEIEL

SEQ ID NO: 7098 - protein, 9 aa, Homo sapiens
VLQHGAAAA

SEQ ID NO: 7099 - protein, 9 aa, Homo sapiens
VLQQKLEAI

SEQ ID NO: 7100 - protein, 9 aa, Homo sapiens
VLQTVLQEV

SEQ ID NO: 7101 - protein, 8 aa, Homo sapiens
VLQTVLSL

SEQ ID NO: 7102 - protein, 9 aa, Homo sapiens
VLSEENFKV

SEQ ID NO: 7103 - protein, 9 aa, Homo sapiens
VLSELLWQV

SEQ ID NO: 7104 - protein, 9 aa, Homo sapiens
VLSSLNIKL

SEQ ID NO: 7105 - protein, 10 aa, Homo sapiens
VLSWEHLLEL

SEQ ID NO: 7106 - protein, 10 aa, Homo sapiens
VLTELINLHL

SEQ ID NO: 7107 - protein, 9 aa, Homo sapiens
VLTESPPSL

SEQ ID NO: 7108 - protein, 9 aa, Homo sapiens
VLTNKLLTV

SEQ ID NO: 7109 - protein, 9 aa, Homo sapiens
VLTSLVALR

SEQ ID NO: 7110 - protein, 9 aa, Homo sapiens
VLTVDGEQV

SEQ ID NO: 7111 - protein, 9 aa, Homo sapiens
VLVEDLTQV

SEQ ID NO: 7112 - protein, 9 aa, Homo sapiens
VLVEHVKNV

SEQ ID NO: 7113 - protein, 9 aa, Homo sapiens
VLVQLIHSV

SEQ ID NO: 7114 - protein, 9 aa, Homo sapiens
VLVQVSPSL

SEQ ID NO: 7115 - protein, 9 aa, Homo sapiens
VLVSQTNEL

SEQ ID NO: 7116 - protein, 10 aa, Homo sapiens
VLVTAGEVHL

SEQ ID NO: 7117 - protein, 10 aa, Homo sapiens
VLVTLAGIIV

SEQ ID NO: 7118 - protein, 9 aa, Homo sapiens
VLWAMVMRI

SEQ ID NO: 7119 - protein, 9 aa, Homo sapiens
VLWDLVDRI

SEQ ID NO: 7120 - protein, 9 aa, Homo sapiens
VLWDQYHNL

SEQ ID NO: 7121 - protein, 11 aa, Homo sapiens
VLWELAHLPTL

SEQ ID NO: 7122 - protein, 9 aa, Homo sapiens
VLWKDIQHA

SEQ ID NO: 7123 - protein, 11 aa, Homo sapiens
VLWMAPDGLYA

SEQ ID NO: 7124 - protein, 9 aa, Homo sapiens
VLWTMVIHI

SEQ ID NO: 7125 - protein, 10 aa, Homo sapiens
VLYDAKIVDV

SEQ ID NO: 7126 - protein, 9 aa, Homo sapiens
VLYDRLLKL

SEQ ID NO: 7127 - protein, 9 aa, Homo sapiens
VLYDWKERL

SEQ ID NO: 7128 - protein, 10 aa, Homo sapiens
VLYGGLLEHL

SEQ ID NO: 7129 - protein, 9 aa, Homo sapiens
VLYKWTNYL

SEQ ID NO: 7130 - protein, 10 aa, Homo sapiens
VLYNQRVEEI

SEQ ID NO: 7131 - protein, 9 aa, Homo sapiens
VLYPHPPLA

SEQ ID NO: 7132 - protein, 9 aa, Homo sapiens
VLYPSLKEI

SEQ ID NO: 7133 - protein, 9 aa, Homo sapiens
VMAEAPPGV

SEQ ID NO: 7134 - protein, 11 aa, Homo sapiens
VMFEDGVLMRL

SEQ ID NO: 7135 - protein, 9 aa, Homo sapiens
VQDDIKESV

SEQ ID NO: 7136 - protein, 9 aa, Homo sapiens
VQDENVRGV

SEQ ID NO: 7137 - protein, 10 aa, Homo sapiens
VQDPNTGFSV

SEQ ID NO: 7138 - protein, 9 aa, Homo sapiens
VQTAELTKV

SEQ ID NO: 7139 - protein, 10 aa, Homo sapiens
VTIVETPPMV

SEQ ID NO: 7140 - protein, 9 aa, Homo sapiens
VVAEELENV

SEQ ID NO: 7141 - protein, 9 aa, Homo sapiens
VVDAVVTQV

SEQ ID NO: 7142 - protein, 10 aa, Homo sapiens
VVIEKTSPPV

SEQ ID NO: 7143 - protein, 9 aa, Homo sapiens
VVSGPPPAV

SEQ ID NO: 7144 - protein, 9 aa, Homo sapiens
VVWGTVIRV

SEQ ID NO: 7145 - protein, 11 aa, Homo sapiens
WLAGYVFLVLL

SEQ ID NO: 7146 - protein, 9 aa, Homo sapiens
WLAHAIQTV

SEQ ID NO: 7147 - protein, 10 aa, Homo sapiens
WLAQQAAKAM

SEQ ID NO: 7148 - protein, 10 aa, Homo sapiens
WLKNGAALVL

SEQ ID NO: 7149 - protein, 9 aa, Homo sapiens
WLLQTHWTL

SEQ ID NO: 7150 - protein, 9 aa, Homo sapiens
WLQLQIPRI

SEQ ID NO: 7151 - protein, 11 aa, Homo sapiens
WLRYQGVPVEE

SEQ ID NO: 7152 - protein, 9 aa, Homo sapiens
WLYGEDHQI

SEQ ID NO: 7153 - protein, 9 aa, Homo sapiens
WVDETLSSV

SEQ ID NO: 7154 - protein, 8 aa, Homo sapiens
WVLSQVQL

SEQ ID NO: 7155 - protein, 9 aa, Homo sapiens
YCAEIAHNV

SEQ ID NO: 7156 - protein, 9 aa, Homo sapiens
YCYDNIHFM

SEQ ID NO: 7157 - protein, 9 aa, Homo sapiens
YGLPVVVKL

SEQ ID NO: 7158 - protein, 10 aa, Homo sapiens
YILEGEPGKV

SEQ ID NO: 7159 - protein, 9 aa, Homo sapiens
YILGKFFAL

SEQ ID NO: 7160 - protein, 9 aa, Homo sapiens
YILKIVPTV

SEQ ID NO: 7161 - protein, 9 aa, Homo sapiens
YISFQPPGV

SEQ ID NO: 7162 - protein, 10 aa, Homo sapiens
YITLTGVHQV

SEQ ID NO: 7163 - protein, 9 aa, Homo sapiens
YIYHGTVKL

SEQ ID NO: 7164 - protein, 10 aa, Homo sapiens
YLADLLMPHL

SEQ ID NO: 7165 - protein, 9 aa, Homo sapiens
YLADQNNQV

SEQ ID NO: 7166 - protein, 9 aa, Homo sapiens
YLAHLAHHL

SEQ ID NO: 7167 - protein, 9 aa, Homo sapiens
YLAKVKSLL

SEQ ID NO: 7168 - protein, 10 aa, Homo sapiens
YLARIQGFQV

SEQ ID NO: 7169 - protein, 10 aa, Homo sapiens
YLASDEITTV

SEQ ID NO: 7170 - protein, 9 aa, Homo sapiens
YLAVESPFL

SEQ ID NO: 7171 - protein, 9 aa, Homo sapiens
YLCYEVERL

SEQ ID NO: 7172 - protein, 10 aa, Homo sapiens
YLDGHLITTV

SEQ ID NO: 7173 - protein, 10 aa, Homo sapiens
YLDHTADVQL

SEQ ID NO: 7174 - protein, 9 aa, Homo sapiens
YLDIARYLL

SEQ ID NO: 7175 - protein, 10 aa, Homo sapiens
YLDIKGLLDV

SEQ ID NO: 7176 - protein, 9 aa, Homo sapiens
YLDKMNNNI

SEQ ID NO: 7177 - protein, 10 aa, Homo sapiens
YLDPRLAFTV

SEQ ID NO: 7178 - protein, 9 aa, Homo sapiens
YLDPVQRDL

SEQ ID NO: 7179 - protein, 10 aa, Homo sapiens
YLDQGTQIFL

SEQ ID NO: 7180 - protein, 9 aa, Homo sapiens
YLDQRELLL

SEQ ID NO: 7181 - protein, 9 aa, Homo sapiens
YLDTINRSV

SEQ ID NO: 7182 - protein, 9 aa, Homo sapiens
YLDVVQSNV

SEQ ID NO: 7183 - protein, 9 aa, Homo sapiens
YLEDTDRNL

SEQ ID NO: 7184 - protein, 9 aa, Homo sapiens
YLFAVNIKL

SEQ ID NO: 7185 - protein, 9 aa, Homo sapiens
YLFDLPLKV

SEQ ID NO: 7186 - protein, 9 aa, Homo sapiens
YLFEEIAKI

SEQ ID NO: 7187 - protein, 9 aa, Homo sapiens
YLFGERLLE

SEQ ID NO: 7188 - protein, 11 aa, Homo sapiens
YLFHIAGAYLL

SEQ ID NO: 7189 - protein, 10 aa, Homo sapiens
YLFHREVQAV

SEQ ID NO: 7190 - protein, 9 aa, Homo sapiens
YLFPRQLLI

SEQ ID NO: 7191 - protein, 10 aa, Homo sapiens
YLFSEALNAA

SEQ ID NO: 7192 - protein, 9 aa, Homo sapiens
YLGDLLETC

SEQ ID NO: 7193 - protein, 11 aa, Homo sapiens
YLGLDGFVERI

SEQ ID NO: 7194 - protein, 10 aa, Homo sapiens
YLGLLENVRV

SEQ ID NO: 7195 - protein, 9 aa, Homo sapiens
YLGPVSPSL

SEQ ID NO: 7196 - protein, 9 aa, Homo sapiens
YLGRLAHEV

SEQ ID NO: 7197 - protein, 9 aa, Homo sapiens
YLHEFLTSA

SEQ ID NO: 7198 - protein, 11 aa, Homo sapiens
YLHNPSSEETI

SEQ ID NO: 7199 - protein, 9 aa, Homo sapiens
YLHREVVEL

SEQ ID NO: 7200 - protein, 9 aa, Homo sapiens
YLHSGQVAL

SEQ ID NO: 7201 - protein, 9 aa, Homo sapiens
YLHTNVALV

SEQ ID NO: 7202 - protein, 9 aa, Homo sapiens
YLHTTIFGL

SEQ ID NO: 7203 - protein, 9 aa, Homo sapiens
YLHWGHFEM

SEQ ID NO: 7204 - protein, 9 aa, Homo sapiens
YLHWLLTNI

SEQ ID NO: 7205 - protein, 9 aa, Homo sapiens
YLIAHLPRL

SEQ ID NO: 7206 - protein, 9 aa, Homo sapiens
YLIARVMLL

SEQ ID NO: 7207 - protein, 9 aa, Homo sapiens
YLIEKSRVV

SEQ ID NO: 7208 - protein, 11 aa, Homo sapiens
YLIGQHVTAAL

SEQ ID NO: 7209 - protein, 9 aa, Homo sapiens
YLIGVHASL

SEQ ID NO: 7210 - protein, 9 aa, Homo sapiens
YLIHLLQEL

SEQ ID NO: 7211 - protein, 9 aa, Homo sapiens
YLIKFLAKL

SEQ ID NO: 7212 - protein, 9 aa, Homo sapiens
YLILHLIST

SEQ ID NO: 7213 - protein, 10 aa, Homo sapiens
YLINSPVVRA

SEQ ID NO: 7214 - protein, 9 aa, Homo sapiens
YLITSVELL

SEQ ID NO: 7215 - protein, 9 aa, Homo sapiens
YLKDEIEEL

SEQ ID NO: 7216 - protein, 9 aa, Homo sapiens
YLKDFFSNV

SEQ ID NO: 7217 - protein, 10 aa, Homo sapiens
YLKDGPYITA

SEQ ID NO: 7218 - protein, 9 aa, Homo sapiens
YLKEILEQL

SEQ ID NO: 7219 - protein, 11 aa, Homo sapiens
YLKIQPGAVPG

SEQ ID NO: 7220 - protein, 9 aa, Homo sapiens
YLLASKAYL

SEQ ID NO: 7221 - protein, 10 aa, Homo sapiens
YLLDDGTLVV

SEQ ID NO: 7222 - protein, 10 aa, Homo sapiens
YLLDHLHLEL

SEQ ID NO: 7223 - protein, 10 aa, Homo sapiens
YLLDLHSYLL

SEQ ID NO: 7224 - protein, 9 aa, Homo sapiens
YLLDLLRLP

SEQ ID NO: 7225 - protein, 10 aa, Homo sapiens
YLLDLPNPVI

SEQ ID NO: 7226 - protein, 11 aa, Homo sapiens
YLLDPKIADLV

SEQ ID NO: 7227 - protein, 9 aa, Homo sapiens
YLLDRLPEM

SEQ ID NO: 7228 - protein, 10 aa, Homo sapiens
YLLEEKIASL

SEQ ID NO: 7229 - protein, 10 aa, Homo sapiens
YLLEENKIKL

SEQ ID NO: 7230 - protein, 9 aa, Homo sapiens
YLLEKSRLV

SEQ ID NO: 7231 - protein, 9 aa, Homo sapiens
YLLEKSRVL

SEQ ID NO: 7232 - protein, 9 aa, Homo sapiens
YLLEKSRVV

SEQ ID NO: 7233 - protein, 10 aa, Homo sapiens
YLLEQDFPGM

SEQ ID NO: 7234 - protein, 9 aa, Homo sapiens
YLLEQGAQV

SEQ ID NO: 7235 - protein, 11 aa, Homo sapiens
YLLEQIKLIEV

SEQ ID NO: 7236 - protein, 10 aa, Homo sapiens
YLLKFEQIYL

SEQ ID NO: 7237 - protein, 11 aa, Homo sapiens
YLLNDASLISV

SEQ ID NO: 7238 - protein, 9 aa, Homo sapiens
YLLPFISKL

SEQ ID NO: 7239 - protein, 9 aa, Homo sapiens
YLLPLLQRL

SEQ ID NO: 7240 - protein, 9 aa, Homo sapiens
YLLPVKMLL

SEQ ID NO: 7241 - protein, 9 aa, Homo sapiens
YLLQSVNQL

SEQ ID NO: 7242 - protein, 9 aa, Homo sapiens
YLLREWVNL

SEQ ID NO: 7243 - protein, 11 aa, Homo sapiens
YLLSEKDLILA

SEQ ID NO: 7244 - protein, 9 aa, Homo sapiens
YLNALVHLI

SEQ ID NO: 7245 - protein, 9 aa, Homo sapiens
YLNDGLWHM

SEQ ID NO: 7246 - protein, 9 aa, Homo sapiens
YLNEIKDSV

SEQ ID NO: 7247 - protein, 11 aa, Homo sapiens
YLNEIKDSVVA

SEQ ID NO: 7248 - protein, 11 aa, Homo sapiens
YLNEQGDRVYT

SEQ ID NO: 7249 - protein, 9 aa, Homo sapiens
YLNEQVKAI

SEQ ID NO: 7250 - protein, 9 aa, Homo sapiens
YLPHAPPFA

SEQ ID NO: 7251 - protein, 9 aa, Homo sapiens
YLQDLLAWV

SEQ ID NO: 7252 - protein, 9 aa, Homo sapiens
YLQDTMNHV

SEQ ID NO: 7253 - protein, 9 aa, Homo sapiens
YLQDVIMQV

SEQ ID NO: 7254 - protein, 9 aa, Homo sapiens
YLQEQAYRL

SEQ ID NO: 7255 - protein, 9 aa, Homo sapiens
YLQLTQSEL

SEQ ID NO: 7256 - protein, 9 aa, Homo sapiens
YLQPFLAKL

SEQ ID NO: 7257 - protein, 9 aa, Homo sapiens
YLSAKVEAL

SEQ ID NO: 7258 - protein, 10 aa, Homo sapiens
YLSEVGDTQV

SEQ ID NO: 7259 - protein, 9 aa, Homo sapiens
YLSLLNQQL

SEQ ID NO: 7260 - protein, 9 aa, Homo sapiens
YLSQLDLII

SEQ ID NO: 7261 - protein, 9 aa, Homo sapiens
YLSVKIWDL

SEQ ID NO: 7262 - protein, 9 aa, Homo sapiens
YLTAATHGL

SEQ ID NO: 7263 - protein, 9 aa, Homo sapiens
YLTDLQVSL

SEQ ID NO: 7264 - protein, 9 aa, Homo sapiens
YLTQVDILL

SEQ ID NO: 7265 - protein, 9 aa, Homo sapiens
YLTSKIFGI

SEQ ID NO: 7266 - protein, 10 aa, Homo sapiens
YLTTLRALYL

SEQ ID NO: 7267 - protein, 9 aa, Homo sapiens
YLVDNKLHL

SEQ ID NO: 7268 - protein, 9 aa, Homo sapiens
YLVEGRFSV

SEQ ID NO: 7269 - protein, 10 aa, Homo sapiens
YLVEINKILL

SEQ ID NO: 7270 - protein, 9 aa, Homo sapiens
YLVGNVCIL

SEQ ID NO: 7271 - protein, 9 aa, Homo sapiens
YLVTGVTTV

SEQ ID NO: 7272 - protein, 9 aa, Homo sapiens
YLVTKVVAV

SEQ ID NO: 7273 - protein, 9 aa, Homo sapiens
YLVTSIAKA

SEQ ID NO: 7274 - protein, 10 aa, Homo sapiens
YLWDLDHGFA

SEQ ID NO: 7275 - protein, 10 aa, Homo sapiens
YLWHIPLSYV

SEQ ID NO: 7276 - protein, 9 aa, Homo sapiens
YLWLKLNQV

SEQ ID NO: 7277 - protein, 9 aa, Homo sapiens
YLWNLQVKL

SEQ ID NO: 7278 - protein, 9 aa, Homo sapiens
YLWNTVSKL

SEQ ID NO: 7279 - protein, 9 aa, Homo sapiens
YLWSRVEKL

SEQ ID NO: 7280 - protein, 10 aa, Homo sapiens
YLYDSETKNA

SEQ ID NO: 7281 - protein, 10 aa, Homo sapiens
YLYNNMIAKI

SEQ ID NO: 7282 - protein, 10 aa, Homo sapiens
YLYNRLMDFL

SEQ ID NO: 7283 - protein, 10 aa, Homo sapiens
YLYPSTLVRT

SEQ ID NO: 7284 - protein, 9 aa, Homo sapiens
YLYQEQYFI

SEQ ID NO: 7285 - protein, 10 aa, Homo sapiens
YLYQHVLATL

SEQ ID NO: 7286 - protein, 10 aa, Homo sapiens
YLYSGHTVML

SEQ ID NO: 7287 - protein, 9 aa, Homo sapiens
YLYSLEVQL

SEQ ID NO: 7288 - protein, 10 aa, Homo sapiens
YLYSNKLQSL

SEQ ID NO: 7289 - protein, 9 aa, Homo sapiens
YMDQWVPVI

SEQ ID NO: 7290 - protein, 9 aa, Homo sapiens
YMGETETKV

SEQ ID NO: 7291 - protein, 9 aa, Homo sapiens
YMGQSIHQV

SEQ ID NO: 7292 - protein, 9 aa, Homo sapiens
YMMPVNSEV

SEQ ID NO: 7293 - protein, 9 aa, Homo sapiens
YMSDSFINV

SEQ ID NO: 7294 - protein, 9 aa, Homo sapiens
YMVHIQVTL

SEQ ID NO: 7295 - protein, 11 aa, Homo sapiens
YQFGEIRTITV

SEQ ID NO: 7296 - protein, 9 aa, Homo sapiens
YQLEEIQRV

SEQ ID NO: 7297 - protein, 9 aa, Homo sapiens
YSDIDIILL

SEQ ID NO: 7298 - protein, 11 aa, Homo sapiens
YTLPIASSIRL

SEQ ID NO: 7299 - protein, 9 aa, Homo sapiens
YTWEEVFRV

SEQ ID NO: 7300 - protein, 9 aa, Homo sapiens
YVSEILEKV

SEQ ID NO: 7301 - protein, 12 aa, Homo sapiens
AEPLEIILHLPL

SEQ ID NO: 7302 - protein, 10 aa, Homo sapiens
ALIAAGKEII

SEQ ID NO: 7303 - protein, 11 aa, Homo sapiens
APKISMPDIDL

SEQ ID NO: 7304 - protein, 11 aa, Homo sapiens
APSTVPIMHQV

SEQ ID NO: 7305 - protein, 12 aa, Homo sapiens
CQIGCCYRAKVF

SEQ ID NO: 7306 - protein, 11 aa, Toxoplasma gondii ME49
FILPDSLPLDT

SEQ ID NO: 7307 - protein, 9 aa, Homo sapiens
FLPQKIIYL

SEQ ID NO: 7308 - protein, 12 aa, Homo sapiens
FRSPLSTGVKDL

SEQ ID NO: 7309 - protein, 11 aa, Homo sapiens
IAAEGIHTGQF

SEQ ID NO: 7310 - protein, 12 aa, Homo sapiens
IAFLSPKVDPSL

SEQ ID NO: 7311 - protein, 10 aa, Homo sapiens
IIVSNPVDIL

SEQ ID NO: 7312 - protein, 10 aa, Homo sapiens
IVSNPVDILT

SEQ ID NO: 7313 - protein, 9 aa, Measles virus strain Edmonston-B
KIIDNTEQL

SEQ ID NO: 7314 - protein, 11 aa, Homo sapiens
KIPSRVHGSLE

SEQ ID NO: 7315 - protein, 9 aa, Measles virus strain Edmonston-B
KLIDGFFPA

SEQ ID NO: 7316 - protein, 12 aa, Homo sapiens
KNNACGIANLAS

SEQ ID NO: 7317 - protein, 12 aa, Homo sapiens
KVIPELNGKLTG

SEQ ID NO: 7318 - protein, 9 aa, Measles virus strain Edmonston-B
KVSPYLFTV

SEQ ID NO: 7319 - protein, 9 aa, Homo sapiens
LALGQDRIL

SEQ ID NO: 7320 - protein, 11 aa, Homo sapiens
LARDYAAIVFF

SEQ ID NO: 7321 - protein, 10 aa, Homo sapiens
LILAPTRELA

SEQ ID NO: 7322 - protein, 11 aa, Homo sapiens
LLERCIHPADI

SEQ ID NO: 7323 - protein, 10 aa, Homo sapiens
LLSGGLPRKC

SEQ ID NO: 7324 - protein, 12 aa, Homo sapiens
LSVADLAESIMK

SEQ ID NO: 7325 - protein, 9 aa, Homo sapiens
LTKAPVDLL

SEQ ID NO: 7326 - protein, 12 aa, Homo sapiens
LYWSLPEKPNGL

SEQ ID NO: 7327 - protein, 11 aa, Homo sapiens
NAISRIPKGQV

SEQ ID NO: 7328 - protein, 9 aa, Homo sapiens
NLEPRTGFL

SEQ ID NO: 7329 - protein, 9 aa, Homo sapiens
NLPTGIPIV

SEQ ID NO: 7330 - protein, 11 aa, Homo sapiens
QLDGLSVSLGR

SEQ ID NO: 7331 - protein, 11 aa, Homo sapiens
QLYEEEIRELQ

SEQ ID NO: 7332 - protein, 11 aa, Homo sapiens
RGTINLSTAHI

SEQ ID NO: 7333 - protein, 11 aa, Measles virus strain Edmonston-B
RQAGQEMILAV

SEQ ID NO: 7334 - protein, 12 aa, Homo sapiens
SLDMDSIIAEVK

SEQ ID NO: 7335 - protein, 12 aa, Homo sapiens
SLHTRTRSLDFR

SEQ ID NO: 7336 - protein, 11 aa, Measles virus strain Edmonston-B
SLMPEETLHQV

SEQ ID NO: 7337 - protein, 12 aa, Homo sapiens
SMAGNRLAFLPL

SEQ ID NO: 7338 - protein, 8 aa, Measles virus strain Edmonston-B
SMYRVFEV

SEQ ID NO: 7339 - protein, 10 aa, Homo sapiens
SNLKLPKGIL

SEQ ID NO: 7340 - protein, 12 aa, Homo sapiens
SQQIEESTTVVT

SEQ ID NO: 7341 - protein, 10 aa, Homo sapiens
SSVPGVRLLQ

SEQ ID NO: 7342 - protein, 9 aa, Homo sapiens
VIAQGIGKL

SEQ ID NO: 7343 - protein, 12 aa, Measles virus strain Edmonston-B
VIINDDQGLFKV

SEQ ID NO: 7344 - protein, 11 aa, Homo sapiens
VLNLGKDSNNL

SEQ ID NO: 7345 - protein, 12 aa, Homo sapiens
YISPDQLADLYK

SEQ ID NO: 7346 - protein, 12 aa, Homo sapiens
YLTPLPQPNRAL

SEQ ID NO: 7347 - protein, 10 aa, Homo sapiens
GQFKDIITKV

SEQ ID NO: 7348 - protein, 11 aa, Homo sapiens
KVWDLPSTSHV

SEQ ID NO: 7349 - protein, 10 aa, Homo sapiens
AIAELGIYPA

SEQ ID NO: 7350 - protein, 9 aa, Homo sapiens
AILDTLYEV

SEQ ID NO: 7351 - protein, 11 aa, Homo sapiens
AILGITESFQV

SEQ ID NO: 7352 - protein, 9 aa, Homo sapiens
AIMGFIGFF

SEQ ID NO: 7353 - protein, 10 aa, Homo sapiens
AIMGFIGFFV

SEQ ID NO: 7354 - protein, 9 aa, Homo sapiens
AINQFTQAL

SEQ ID NO: 7355 - protein, 11 aa, Homo sapiens
AISEVVSQTPA

SEQ ID NO: 7356 - protein, 9 aa, Homo sapiens
AITDKIFQI

SEQ ID NO: 7357 - protein, 11 aa, Homo sapiens
ALAADIDIDTV

SEQ ID NO: 7358 - protein, 9 aa, Homo sapiens
ALAAFISSV

SEQ ID NO: 7359 - protein, 10 aa, Homo sapiens
ALAALGLPGA

SEQ ID NO: 7360 - protein, 9 aa, Homo sapiens
ALAASPASV

SEQ ID NO: 7361 - protein, 12 aa, Homo sapiens
ALAAVAGGAPSV

SEQ ID NO: 7362 - protein, 10 aa, Homo sapiens
ALADDDFLTV

SEQ ID NO: 7363 - protein, 9 aa, Homo sapiens
ALADFAELI

SEQ ID NO: 7364 - protein, 9 aa, Homo sapiens
ALADIVWRA

SEQ ID NO: 7365 - protein, 9 aa, Homo sapiens
ALADLQEAV

SEQ ID NO: 7366 - protein, 11 aa, Homo sapiens
ALADLQEAVKL

SEQ ID NO: 7367 - protein, 10 aa, Homo sapiens
ALADVEVTYT

SEQ ID NO: 7368 - protein, 11 aa, Homo sapiens
ALADVEVTYTV

SEQ ID NO: 7369 - protein, 9 aa, Homo sapiens
ALADVVHEA

SEQ ID NO: 7370 - protein, 10 aa, Homo sapiens
ALAEDGPPTV

SEQ ID NO: 7371 - protein, 12 aa, Homo sapiens
ALAEGEPEGPWM

SEQ ID NO: 7372 - protein, 9 aa, Homo sapiens
ALAEKTSHV

SEQ ID NO: 7373 - protein, 10 aa, Homo sapiens
ALAELENIEV

SEQ ID NO: 7374 - protein, 9 aa, Homo sapiens
ALAELFGLL

SEQ ID NO: 7375 - protein, 10 aa, Homo sapiens
ALAELFGLLV

SEQ ID NO: 7376 - protein, 12 aa, Homo sapiens
ALAELSTAMHQV

SEQ ID NO: 7377 - protein, 10 aa, Homo sapiens
ALAELYEDEV

SEQ ID NO: 7378 - protein, 10 aa, Homo sapiens
ALAENSGVKA

SEQ ID NO: 7379 - protein, 10 aa, Homo sapiens
ALAEPLIQNV

SEQ ID NO: 7380 - protein, 11 aa, Homo sapiens
ALAEQHAVQEL

SEQ ID NO: 7381 - protein, 9 aa, Homo sapiens
ALAFDLSKV

SEQ ID NO: 7382 - protein, 9 aa, Homo sapiens
ALAGAPYQA

SEQ ID NO: 7383 - protein, 9 aa, Homo sapiens
ALAGVSFEI

SEQ ID NO: 7384 - protein, 9 aa, Homo sapiens
ALALPAPAL

SEQ ID NO: 7385 - protein, 10 aa, Homo sapiens
ALANQKLYSV

SEQ ID NO: 7386 - protein, 9 aa, Homo sapiens
ALANVNIGS

SEQ ID NO: 7387 - protein, 9 aa, Homo sapiens
ALAPLAIPS

SEQ ID NO: 7388 - protein, 10 aa, Homo sapiens
ALAPLAIPSA

SEQ ID NO: 7389 - protein, 9 aa, Homo sapiens
ALAQKNVKL

SEQ ID NO: 7390 - protein, 10 aa, Homo sapiens
ALASLKKYGV

SEQ ID NO: 7391 - protein, 9 aa, Homo sapiens
ALDASILNV

SEQ ID NO: 7392 - protein, 8 aa, Homo sapiens
ALDDFSIS

SEQ ID NO: 7393 - protein, 9 aa, Homo sapiens
ALDDFSISV

SEQ ID NO: 7394 - protein, 9 aa, Homo sapiens
ALDDIEWFV

SEQ ID NO: 7395 - protein, 9 aa, Homo sapiens
ALDDISESI

SEQ ID NO: 7396 - protein, 10 aa, Homo sapiens
ALDEAQGVGL

SEQ ID NO: 7397 - protein, 9 aa, Homo sapiens
ALDEEYLKV

SEQ ID NO: 7398 - protein, 10 aa, Homo sapiens
ALDELASLQV

SEQ ID NO: 7399 - protein, 9 aa, Homo sapiens
ALDEVIFSL

SEQ ID NO: 7400 - protein, 9 aa, Homo sapiens
ALDFEQEMA

SEQ ID NO: 7401 - protein, 11 aa, Homo sapiens
ALDGAAGTVYL

SEQ ID NO: 7402 - protein, 9 aa, Homo sapiens
ALDIAENEM

SEQ ID NO: 7403 - protein, 9 aa, Homo sapiens
ALDLAPSSL

SEQ ID NO: 7404 - protein, 9 aa, Homo sapiens
ALDNFLDKL

SEQ ID NO: 7405 - protein, 9 aa, Homo sapiens
ALDPMSVLL

SEQ ID NO: 7406 - protein, 9 aa, Homo sapiens
ALDSASILL

SEQ ID NO: 7407 - protein, 9 aa, Homo sapiens
ALDTKGPEI

SEQ ID NO: 7408 - protein, 9 aa, Homo sapiens
ALDTSNVMV

SEQ ID NO: 7409 - protein, 9 aa, Homo sapiens
ALEEKLENV

SEQ ID NO: 7410 - protein, 10 aa, Homo sapiens
ALEELGTLQV

SEQ ID NO: 7411 - protein, 9 aa, Homo sapiens
ALEKLLPHI

SEQ ID NO: 7412 - protein, 12 aa, Homo sapiens
ALFAPRDPIPYL

SEQ ID NO: 7413 - protein, 11 aa, Homo sapiens
ALFASGLIHRV

SEQ ID NO: 7414 - protein, 9 aa, Homo sapiens
ALFEDGPEA

SEQ ID NO: 7415 - protein, 12 aa, Homo sapiens
ALFEDGPEAEAV

SEQ ID NO: 7416 - protein, 10 aa, Homo sapiens
ALFEEVPELL

SEQ ID NO: 7417 - protein, 11 aa, Homo sapiens
ALFEEVPELLT

SEQ ID NO: 7418 - protein, 10 aa, Homo sapiens
ALFGVVFPHV

SEQ ID NO: 7419 - protein, 10 aa, Homo sapiens
ALFILPFVSV

SEQ ID NO: 7420 - protein, 10 aa, Homo sapiens
ALFNRLVPSV

SEQ ID NO: 7421 - protein, 8 aa, Homo sapiens
ALFPGVAL

SEQ ID NO: 7422 - protein, 10 aa, Homo sapiens
ALFPHLLQPV

SEQ ID NO: 7423 - protein, 12 aa, Homo sapiens
ALFPHLLQPVLW

SEQ ID NO: 7424 - protein, 8 aa, Homo sapiens
ALFQRPPL

SEQ ID NO: 7425 - protein, 9 aa, Homo sapiens
ALFTFSPLT

SEQ ID NO: 7426 - protein, 10 aa, Homo sapiens
ALFTFSPLTV

SEQ ID NO: 7427 - protein, 12 aa, Homo sapiens
ALGDGALFYFGL

SEQ ID NO: 7428 - protein, 11 aa, Homo sapiens
ALGETFIRYFV

SEQ ID NO: 7429 - protein, 9 aa, Homo sapiens
ALGIANPLL

SEQ ID NO: 7430 - protein, 8 aa, Homo sapiens
ALGTVTNV

SEQ ID NO: 7431 - protein, 9 aa, Homo sapiens
ALHDILTEI

SEQ ID NO: 7432 - protein, 9 aa, Homo sapiens
ALHHKDIAL

SEQ ID NO: 7433 - protein, 12 aa, Homo sapiens
ALIAAQYSGAQV

SEQ ID NO: 7434 - protein, 9 aa, Homo sapiens
ALIEGVGIL

SEQ ID NO: 7435 - protein, 9 aa, Homo sapiens
ALIEVLQPL

SEQ ID NO: 7436 - protein, 10 aa, Homo sapiens
ALIEVLQPLI

SEQ ID NO: 7437 - protein, 11 aa, Homo sapiens
ALIEVLQPLIA

SEQ ID NO: 7438 - protein, 12 aa, Homo sapiens
ALIEVLQPLIAE

SEQ ID NO: 7439 - protein, 12 aa, Homo sapiens
ALIEVPDGFTAV

SEQ ID NO: 7440 - protein, 10 aa, Homo sapiens
ALIKAAGVNV

SEQ ID NO: 7441 - protein, 9 aa, Homo sapiens
ALIKQLFEA

SEQ ID NO: 7442 - protein, 11 aa, Homo sapiens
ALILHDDEVTV

SEQ ID NO: 7443 - protein, 11 aa, Homo sapiens
ALKEEIGNVQL

SEQ ID NO: 7444 - protein, 10 aa, Homo sapiens
ALLADELITV

SEQ ID NO: 7445 - protein, 10 aa, Homo sapiens
ALLAEGITWV

SEQ ID NO: 7446 - protein, 11 aa, Homo sapiens
ALLDAAGVASL

SEQ ID NO: 7447 - protein, 12 aa, Homo sapiens
ALLDAAGVASLL

SEQ ID NO: 7448 - protein, 8 aa, Homo sapiens
ALLDEIST

SEQ ID NO: 7449 - protein, 12 aa, Homo sapiens
ALLDEQQVNVLL

SEQ ID NO: 7450 - protein, 8 aa, Homo sapiens
ALLDEVIM

SEQ ID NO: 7451 - protein, 10 aa, Homo sapiens
ALLDFYMKNI

SEQ ID NO: 7452 - protein, 10 aa, Homo sapiens
ALLDLFSPSV

SEQ ID NO: 7453 - protein, 12 aa, Homo sapiens
ALLDLFSPSVTV

SEQ ID NO: 7454 - protein, 8 aa, Homo sapiens
ALLDRIVS

SEQ ID NO: 7455 - protein, 9 aa, Homo sapiens
ALLDRYFEA

SEQ ID NO: 7456 - protein, 9 aa, Homo sapiens
ALLDSFITI

SEQ ID NO: 7457 - protein, 10 aa, Homo sapiens
ALLDVTPNAV

SEQ ID NO: 7458 - protein, 10 aa, Homo sapiens
ALLEEAEQLL

SEQ ID NO: 7459 - protein, 12 aa, Homo sapiens
ALLEEFPDKGFF

SEQ ID NO: 7460 - protein, 10 aa, Homo sapiens
ALLELAEELL

SEQ ID NO: 7461 - protein, 9 aa, Homo sapiens
ALLELLERL

SEQ ID NO: 7462 - protein, 9 aa, Homo sapiens
ALLETMFGV

SEQ ID NO: 7463 - protein, 11 aa, Homo sapiens
ALLGEEDEEAL

SEQ ID NO: 7464 - protein, 9 aa, Homo sapiens
ALLGFLVLV

SEQ ID NO: 7465 - protein, 9 aa, Homo sapiens
ALLGKIEKV

SEQ ID NO: 7466 - protein, 11 aa, Homo sapiens
ALLGKIEKVRV

SEQ ID NO: 7467 - protein, 10 aa, Homo sapiens
ALLGMDLLRL

SEQ ID NO: 7468 - protein, 10 aa, Homo sapiens
ALLGRIPSAV

SEQ ID NO: 7469 - protein, 9 aa, Homo sapiens
ALLGYLQEV

SEQ ID NO: 7470 - protein, 9 aa, Homo sapiens
ALLLHLPAL

SEQ ID NO: 7471 - protein, 9 aa, Homo sapiens
ALLLPPVTL

SEQ ID NO: 7472 - protein, 9 aa, Homo sapiens
ALLNETESV

SEQ ID NO: 7473 - protein, 8 aa, Homo sapiens
ALLNGEYL

SEQ ID NO: 7474 - protein, 9 aa, Homo sapiens
ALLNQHYQV

SEQ ID NO: 7475 - protein, 11 aa, Homo sapiens
ALLQELEDLEL

SEQ ID NO: 7476 - protein, 9 aa, Homo sapiens
ALLQRQFDV

SEQ ID NO: 7477 - protein, 9 aa, Homo sapiens
ALLRTVVSV

SEQ ID NO: 7478 - protein, 9 aa, Homo sapiens
ALLSAAFLL

SEQ ID NO: 7479 - protein, 9 aa, Homo sapiens
ALLSGIVSI

SEQ ID NO: 7480 - protein, 9 aa, Homo sapiens
ALLSSGFSL

SEQ ID NO: 7481 - protein, 9 aa, Homo sapiens
ALLTAVTNV

SEQ ID NO: 7482 - protein, 10 aa, Homo sapiens
ALLTGIISKA

SEQ ID NO: 7483 - protein, 9 aa, Homo sapiens
ALLVTQQLV

SEQ ID NO: 7484 - protein, 10 aa, Homo sapiens
ALMDGKVYDI

SEQ ID NO: 7485 - protein, 9 aa, Homo sapiens
ALMDLVQGV

SEQ ID NO: 7486 - protein, 11 aa, Homo sapiens
ALMEDTGRQML

SEQ ID NO: 7487 - protein, 9 aa, Homo sapiens
ALMELDKGL

SEQ ID NO: 7488 - protein, 11 aa, Homo sapiens
ALMEVNLLSGF

SEQ ID NO: 7489 - protein, 11 aa, Homo sapiens
ALMGSPQLVAA

SEQ ID NO: 7490 - protein, 9 aa, Homo sapiens
ALMKAVATV

SEQ ID NO: 7491 - protein, 11 aa, Homo sapiens
ALMKAVATVGP

SEQ ID NO: 7492 - protein, 12 aa, Homo sapiens
ALMNGSESRFFV

SEQ ID NO: 7493 - protein, 10 aa, Homo sapiens
ALMTLGPAVV

SEQ ID NO: 7494 - protein, 11 aa, Homo sapiens
ALNDNLEKGLL

SEQ ID NO: 7495 - protein, 9 aa, Homo sapiens
ALNDSVKTV

SEQ ID NO: 7496 - protein, 9 aa, Homo sapiens
ALNEDIVRV

SEQ ID NO: 7497 - protein, 9 aa, Homo sapiens
ALNENIDRV

SEQ ID NO: 7498 - protein, 9 aa, Homo sapiens
ALNPADITV

SEQ ID NO: 7499 - protein, 9 aa, Homo sapiens
ALNPESNTA

SEQ ID NO: 7500 - protein, 9 aa, Homo sapiens
ALNRISPML

SEQ ID NO: 7501 - protein, 11 aa, Homo sapiens
ALNSPHSESFV

SEQ ID NO: 7502 - protein, 11 aa, Homo sapiens
ALNVEPDGTGL

SEQ ID NO: 7503 - protein, 11 aa, Homo sapiens
ALPAGWKPLFV

SEQ ID NO: 7504 - protein, 9 aa, Homo sapiens
ALPEMEIHL

SEQ ID NO: 7505 - protein, 11 aa, Homo sapiens
ALPGPFPGGRV

SEQ ID NO: 7506 - protein, 10 aa, Homo sapiens
ALPRLTPPVL

SEQ ID NO: 7507 - protein, 8 aa, Homo sapiens
ALQEELQL

SEQ ID NO: 7508 - protein, 11 aa, Homo sapiens
ALQEFGPISYV

SEQ ID NO: 7509 - protein, 12 aa, Homo sapiens
ALQEFGPISYVV

SEQ ID NO: 7510 - protein, 8 aa, Homo sapiens
ALQEISFW

SEQ ID NO: 7511 - protein, 9 aa, Homo sapiens
ALQEISFWL

SEQ ID NO: 7512 - protein, 9 aa, Homo sapiens
ALQEVLKTA

SEQ ID NO: 7513 - protein, 11 aa, Homo sapiens
ALQEVLKTALI

SEQ ID NO: 7514 - protein, 10 aa, Homo sapiens
ALQFLEEVKV

SEQ ID NO: 7515 - protein, 12 aa, Homo sapiens
ALQGAHAWILQV

SEQ ID NO: 7516 - protein, 9 aa, Homo sapiens
ALQGIIHSI

SEQ ID NO: 7517 - protein, 11 aa, Homo sapiens
ALQLQDFYQEV

SEQ ID NO: 7518 - protein, 9 aa, Homo sapiens
ALQWVIPYI

SEQ ID NO: 7519 - protein, 10 aa, Homo sapiens
ALRESPLHPA

SEQ ID NO: 7520 - protein, 12 aa, Homo sapiens
ALSDETKNNWEV

SEQ ID NO: 7521 - protein, 8 aa, Homo sapiens
ALSDLEIT

SEQ ID NO: 7522 - protein, 9 aa, Homo sapiens
ALSEALTEL

SEQ ID NO: 7523 - protein, 11 aa, Homo sapiens
ALSEFGSKIIL

SEQ ID NO: 7524 - protein, 9 aa, Homo sapiens
ALSEGNPGI

SEQ ID NO: 7525 - protein, 11 aa, Homo sapiens
ALSGHLGEVLI

SEQ ID NO: 7526 - protein, 10 aa, Homo sapiens
ALSGLDMVGV

SEQ ID NO: 7527 - protein, 9 aa, Homo sapiens
ALSGTLSGV

SEQ ID NO: 7528 - protein, 10 aa, Homo sapiens
ALSKQEMASA

SEQ ID NO: 7529 - protein, 9 aa, Homo sapiens
ALSNVIHKV

SEQ ID NO: 7530 - protein, 9 aa, Homo sapiens
ALSPNNHEV

SEQ ID NO: 7531 - protein, 10 aa, Homo sapiens
ALSRQEMQEV

SEQ ID NO: 7532 - protein, 9 aa, Homo sapiens
ALSTATATV

SEQ ID NO: 7533 - protein, 9 aa, Homo sapiens
ALTEIQEFI

SEQ ID NO: 7534 - protein, 9 aa, Homo sapiens
ALTELGYNV

SEQ ID NO: 7535 - protein, 9 aa, Homo sapiens
ALTGHLEEV

SEQ ID NO: 7536 - protein, 10 aa, Homo sapiens
ALTGIPLPLI

SEQ ID NO: 7537 - protein, 9 aa, Homo sapiens
ALTGRIQEA

SEQ ID NO: 7538 - protein, 9 aa, Homo sapiens
ALTLATETV

SEQ ID NO: 7539 - protein, 9 aa, Homo sapiens
ALTNVDTPL

SEQ ID NO: 7540 - protein, 10 aa, Homo sapiens
ALTQTGGPHV

SEQ ID NO: 7541 - protein, 9 aa, Homo sapiens
ALTSLELEL

SEQ ID NO: 7542 - protein, 10 aa, Homo sapiens
ALVLGPLKSV

SEQ ID NO: 7543 - protein, 10 aa, Homo sapiens
ALVSKGLATV

SEQ ID NO: 7544 - protein, 9 aa, Homo sapiens
ALWAKSPGV

SEQ ID NO: 7545 - protein, 10 aa, Homo sapiens
ALWAKSPGVL

SEQ ID NO: 7546 - protein, 11 aa, Homo sapiens
ALWAKSPGVLA

SEQ ID NO: 7547 - protein, 11 aa, Homo sapiens
ALWDIETGQQT

SEQ ID NO: 7548 - protein, 12 aa, Homo sapiens
ALWDPENLEEPM

SEQ ID NO: 7549 - protein, 10 aa, Homo sapiens
ALWDPGPEAA

SEQ ID NO: 7550 - protein, 10 aa, Homo sapiens
ALWEETSFQL

SEQ ID NO: 7551 - protein, 9 aa, Homo sapiens
ALWEKNTHL

SEQ ID NO: 7552 - protein, 9 aa, Homo sapiens
ALWGGPISL

SEQ ID NO: 7553 - protein, 11 aa, Homo sapiens
ALWHDAENQTV

SEQ ID NO: 7554 - protein, 12 aa, Homo sapiens
ALWHDAENQTVV

SEQ ID NO: 7555 - protein, 11 aa, Homo sapiens
ALWHVPEHAVV

SEQ ID NO: 7556 - protein, 12 aa, Homo sapiens
ALWHVPEHAVVL

SEQ ID NO: 7557 - protein, 9 aa, Homo sapiens
ALYAMEIKV

SEQ ID NO: 7558 - protein, 9 aa, Homo sapiens
ALYDATYET

SEQ ID NO: 7559 - protein, 12 aa, Homo sapiens
ALYDENTKLWYA

SEQ ID NO: 7560 - protein, 11 aa, Homo sapiens
ALYEDPPDQKT

SEQ ID NO: 7561 - protein, 9 aa, Homo sapiens
ALYEDRYLL

SEQ ID NO: 7562 - protein, 11 aa, Homo sapiens
ALYEDRYLLGT

SEQ ID NO: 7563 - protein, 11 aa, Homo sapiens
ALYEELDLPAV

SEQ ID NO: 7564 - protein, 12 aa, Homo sapiens
ALYEELDLPAVF

SEQ ID NO: 7565 - protein, 10 aa, Homo sapiens
ALYETELADA

SEQ ID NO: 7566 - protein, 11 aa, Homo sapiens
ALYGKTEVVRL

SEQ ID NO: 7567 - protein, 10 aa, Homo sapiens
ALYGSVPVLL

SEQ ID NO: 7568 - protein, 9 aa, Homo sapiens
ALYNALDKV

SEQ ID NO: 7569 - protein, 9 aa, Homo sapiens
ALYNWLIQV

SEQ ID NO: 7570 - protein, 9 aa, Homo sapiens
ALYYNPHLL

SEQ ID NO: 7571 - protein, 10 aa, Homo sapiens
AMFYGDLAEV

SEQ ID NO: 7572 - protein, 9 aa, Homo sapiens
AMGEKSFSV

SEQ ID NO: 7573 - protein, 9 aa, Homo sapiens
AMLAKTAGV

SEQ ID NO: 7574 - protein, 9 aa, Homo sapiens
AMLEEVNYI

SEQ ID NO: 7575 - protein, 9 aa, Homo sapiens
AMLGQAEEV

SEQ ID NO: 7576 - protein, 9 aa, Homo sapiens
AMMHALEVL

SEQ ID NO: 7577 - protein, 9 aa, Homo sapiens
AMNFHEVLA

SEQ ID NO: 7578 - protein, 9 aa, Homo sapiens
AMNGKSFSV

SEQ ID NO: 7579 - protein, 11 aa, Homo sapiens
AMNYEGSPIKV

SEQ ID NO: 7580 - protein, 12 aa, Homo sapiens
AMQEFMILPVGA

SEQ ID NO: 7581 - protein, 9 aa, Homo sapiens
AMRPSEEHV

SEQ ID NO: 7582 - protein, 9 aa, Homo sapiens
AMSPTAAAV

SEQ ID NO: 7583 - protein, 8 aa, Homo sapiens
AMSSKFFL

SEQ ID NO: 7584 - protein, 9 aa, Homo sapiens
AMSSKFFLV

SEQ ID NO: 7585 - protein, 11 aa, Homo sapiens
AMVEMADGYAV

SEQ ID NO: 7586 - protein, 10 aa, Homo sapiens
AMVWEGLNVV

SEQ ID NO: 7587 - protein, 10 aa, Homo sapiens
AMWEVNEAFS

SEQ ID NO: 7588 - protein, 11 aa, Homo sapiens
AMWEVNEAFSL

SEQ ID NO: 7589 - protein, 12 aa, Homo sapiens
AMWEVNEAFSLV

SEQ ID NO: 7590 - protein, 10 aa, Homo sapiens
AMYESELERA

SEQ ID NO: 7591 - protein, 9 aa, Homo sapiens
AMYSVEITV

SEQ ID NO: 7592 - protein, 10 aa, Homo sapiens
AQANGWGVMV

SEQ ID NO: 7593 - protein, 9 aa, Homo sapiens
AQHLGESTV

SEQ ID NO: 7594 - protein, 10 aa, Homo sapiens
AQLSEIQTQI

SEQ ID NO: 7595 - protein, 9 aa, Homo sapiens
AQSELDIYL

SEQ ID NO: 7596 - protein, 9 aa, Homo sapiens
AQVEAVHKV

SEQ ID NO: 7597 - protein, 10 aa, Homo sapiens
AQYSGAQVRV

SEQ ID NO: 7598 - protein, 9 aa, Homo sapiens
AVDAVIAEL

SEQ ID NO: 7599 - protein, 10 aa, Homo sapiens
AVFGEEGLTL

SEQ ID NO: 7600 - protein, 12 aa, Homo sapiens
AVFGEEGLTLNL

SEQ ID NO: 7601 - protein, 12 aa, Homo sapiens
AVFGKYGRIVEV

SEQ ID NO: 7602 - protein, 10 aa, Homo sapiens
AVFPFQPGSV

SEQ ID NO: 7603 - protein, 9 aa, Homo sapiens
AVIGAVVDV

SEQ ID NO: 7604 - protein, 9 aa, Homo sapiens
AVLDNPYPV

SEQ ID NO: 7605 - protein, 9 aa, Homo sapiens
AVLPFSPAL

SEQ ID NO: 7606 - protein, 9 aa, Homo sapiens
AVMGIVSEV

SEQ ID NO: 7607 - protein, 10 aa, Homo sapiens
AVSEEQQPAL

SEQ ID NO: 7608 - protein, 11 aa, Homo sapiens
AVWSGVNVAGV

SEQ ID NO: 7609 - protein, 10 aa, Homo sapiens
AVYEGHVSCV

SEQ ID NO: 7610 - protein, 9 aa, Homo sapiens
AVYETDVFV

SEQ ID NO: 7611 - protein, 9 aa, Homo sapiens
CLYGNVEKV

SEQ ID NO: 7612 - protein, 9 aa, Homo sapiens
DLATYINMI

SEQ ID NO: 7613 - protein, 12 aa, Homo sapiens
EAFDLDPAQWGV

SEQ ID NO: 7614 - protein, 11 aa, Homo sapiens
ELLEGKVLPGV

SEQ ID NO: 7615 - protein, 10 aa, Homo sapiens
FAPEEISAMV

SEQ ID NO: 7616 - protein, 11 aa, Homo sapiens
FAPEEISAMVL

SEQ ID NO: 7617 - protein, 9 aa, Homo sapiens
FAPSPTPAV

SEQ ID NO: 7618 - protein, 9 aa, Homo sapiens
FAVQFHPEV

SEQ ID NO: 7619 - protein, 9 aa, Homo sapiens
FGAEAKLEV

SEQ ID NO: 7620 - protein, 9 aa, Homo sapiens
FGANAILGV

SEQ ID NO: 7621 - protein, 11 aa, Homo sapiens
FGIGGDGTQHV

SEQ ID NO: 7622 - protein, 10 aa, Homo sapiens
FGNEVIPVTV

SEQ ID NO: 7623 - protein, 10 aa, Homo sapiens
FGVTIDFDTV

SEQ ID NO: 7624 - protein, 9 aa, Homo sapiens
FIADLVVGL

SEQ ID NO: 7625 - protein, 9 aa, Homo sapiens
FIADVVEKI

SEQ ID NO: 7626 - protein, 9 aa, Homo sapiens
FIADVVEKT

SEQ ID NO: 7627 - protein, 9 aa, Homo sapiens
FIASVNTLV

SEQ ID NO: 7628 - protein, 9 aa, Homo sapiens
FIDEEVKLI

SEQ ID NO: 7629 - protein, 10 aa, Homo sapiens
FIDEGVNIGL

SEQ ID NO: 7630 - protein, 12 aa, Homo sapiens
FIDEGVNIGLEV

SEQ ID NO: 7631 - protein, 11 aa, Homo sapiens
FIDGDLIESFL

SEQ ID NO: 7632 - protein, 9 aa, Homo sapiens
FIDKKPTSA

SEQ ID NO: 7633 - protein, 8 aa, Homo sapiens
FIDLNYMV

SEQ ID NO: 7634 - protein, 10 aa, Homo sapiens
FIDLNYMVYM

SEQ ID NO: 7635 - protein, 10 aa, Homo sapiens
FIDSNPNQPL

SEQ ID NO: 7636 - protein, 11 aa, Homo sapiens
FIDSNPNQPLV

SEQ ID NO: 7637 - protein, 9 aa, Homo sapiens
FIEALLPHV

SEQ ID NO: 7638 - protein, 9 aa, Homo sapiens
FIEKLVPLL

SEQ ID NO: 7639 - protein, 9 aa, Homo sapiens
FIFWAPESA

SEQ ID NO: 7640 - protein, 11 aa, Homo sapiens
FIFWAPESAPL

SEQ ID NO: 7641 - protein, 9 aa, Homo sapiens
FIGEGEPHV

SEQ ID NO: 7642 - protein, 9 aa, Homo sapiens
FIGKVVNPT

SEQ ID NO: 7643 - protein, 10 aa, Homo sapiens
FIGNGVVIHL

SEQ ID NO: 7644 - protein, 9 aa, Homo sapiens
FIGNLPHEV

SEQ ID NO: 7645 - protein, 8 aa, Homo sapiens
FIGYPITL

SEQ ID NO: 7646 - protein, 9 aa, Homo sapiens
FIHDIDREL

SEQ ID NO: 7647 - protein, 12 aa, Homo sapiens
FILEEAITGDFA

SEQ ID NO: 7648 - protein, 10 aa, Homo sapiens
FILKHTGPGI

SEQ ID NO: 7649 - protein, 10 aa, Homo sapiens
FILKHTGPGL

SEQ ID NO: 7650 - protein, 9 aa, Homo sapiens
FIMEELDKV

SEQ ID NO: 7651 - protein, 9 aa, Homo sapiens
FIMEGGAMV

SEQ ID NO: 7652 - protein, 10 aa, Homo sapiens
FIMEGGAMVL

SEQ ID NO: 7653 - protein, 11 aa, Homo sapiens
FIMEGGAMVLA

SEQ ID NO: 7654 - protein, 9 aa, Homo sapiens
FININSLRL

SEQ ID NO: 7655 - protein, 9 aa, Homo sapiens
FIQSIISTV

SEQ ID NO: 7656 - protein, 9 aa, Homo sapiens
FIRELISNA

SEQ ID NO: 7657 - protein, 9 aa, Homo sapiens
FISGDKVNV

SEQ ID NO: 7658 - protein, 10 aa, Homo sapiens
FISVQSPPTV

SEQ ID NO: 7659 - protein, 10 aa, Homo sapiens
FIVNTNVPRA

SEQ ID NO: 7660 - protein, 11 aa, Homo sapiens
FIVSEDGLIVT

SEQ ID NO: 7661 - protein, 11 aa, Homo sapiens
FIWPAIQSSAL

SEQ ID NO: 7662 - protein, 10 aa, Homo sapiens
FIYPAQNPEL

SEQ ID NO: 7663 - protein, 9 aa, Homo sapiens
FLAALPPAI

SEQ ID NO: 7664 - protein, 9 aa, Homo sapiens
FLADGKVFT

SEQ ID NO: 7665 - protein, 10 aa, Homo sapiens
FLADGKVFTT

SEQ ID NO: 7666 - protein, 11 aa, Homo sapiens
FLADGKVFTTG

SEQ ID NO: 7667 - protein, 12 aa, Homo sapiens
FLADGKVFTTGF

SEQ ID NO: 7668 - protein, 9 aa, Homo sapiens
FLADLLVPT

SEQ ID NO: 7669 - protein, 11 aa, Homo sapiens
FLADLLVPTKA

SEQ ID NO: 7670 - protein, 11 aa, Homo sapiens
FLADLMDNSEL

SEQ ID NO: 7671 - protein, 8 aa, Homo sapiens
FLADPSAF

SEQ ID NO: 7672 - protein, 9 aa, Homo sapiens
FLADPSAFV

SEQ ID NO: 7673 - protein, 12 aa, Homo sapiens
FLADPSAFVAAA

SEQ ID NO: 7674 - protein, 10 aa, Homo sapiens
FLAEAELLNL

SEQ ID NO: 7675 - protein, 12 aa, Homo sapiens
FLAEDGGTGGGS

SEQ ID NO: 7676 - protein, 9 aa, Homo sapiens
FLAEEMSKL

SEQ ID NO: 7677 - protein, 12 aa, Homo sapiens
FLAEGIVNGHTL

SEQ ID NO: 7678 - protein, 11 aa, Homo sapiens
FLAEGTAIKDL

SEQ ID NO: 7679 - protein, 12 aa, Homo sapiens
FLAEGTAIKDLK

SEQ ID NO: 7680 - protein, 9 aa, Homo sapiens
FLAENVKQV

SEQ ID NO: 7681 - protein, 10 aa, Homo sapiens
FLAFPSPEKL

SEQ ID NO: 7682 - protein, 12 aa, Homo sapiens
FLAFTTHPSQFL

SEQ ID NO: 7683 - protein, 8 aa, Homo sapiens
FLAFVEKV

SEQ ID NO: 7684 - protein, 9 aa, Homo sapiens
FLAIDAKLT

SEQ ID NO: 7685 - protein, 11 aa, Homo sapiens
FLANEAKGTKV

SEQ ID NO: 7686 - protein, 12 aa, Homo sapiens
FLANIGTSVQNV

SEQ ID NO: 7687 - protein, 9 aa, Homo sapiens
FLAPELPAV

SEQ ID NO: 7688 - protein, 10 aa, Homo sapiens
FLAPELPAVS

SEQ ID NO: 7689 - protein, 11 aa, Homo sapiens
FLAPELPAVSE

SEQ ID NO: 7690 - protein, 12 aa, Homo sapiens
FLAPELPAVSEF

SEQ ID NO: 7691 - protein, 8 aa, Homo sapiens
FLAPGFTL

SEQ ID NO: 7692 - protein, 11 aa, Homo sapiens
FLAPGFTLQNV

SEQ ID NO: 7693 - protein, 12 aa, Homo sapiens
FLAPGFTLQNVG

SEQ ID NO: 7694 - protein, 10 aa, Homo sapiens
FLAPKPAPVL

SEQ ID NO: 7695 - protein, 10 aa, Homo sapiens
FLAPLKPVAI

SEQ ID NO: 7696 - protein, 11 aa, Homo sapiens
FLAQAEVYKEL

SEQ ID NO: 7697 - protein, 11 aa, Homo sapiens
FLAQGTLRPDL

SEQ ID NO: 7698 - protein, 9 aa, Homo sapiens
FLAQKPAPL

SEQ ID NO: 7699 - protein, 10 aa, Homo sapiens
FLAQKPAPLL

SEQ ID NO: 7700 - protein, 9 aa, Homo sapiens
FLAQRISSI

SEQ ID NO: 7701 - protein, 10 aa, Homo sapiens
FLASLDGEKL

SEQ ID NO: 7702 - protein, 9 aa, Homo sapiens
FLASLNPKT

SEQ ID NO: 7703 - protein, 10 aa, Homo sapiens
FLASPEYVNL

SEQ ID NO: 7704 - protein, 8 aa, Homo sapiens
FLASVSTV

SEQ ID NO: 7705 - protein, 9 aa, Homo sapiens
FLASVSTVL

SEQ ID NO: 7706 - protein, 10 aa, Homo sapiens
FLASVSTVLT

SEQ ID NO: 7707 - protein, 9 aa, Homo sapiens
FLATEGDHL

SEQ ID NO: 7708 - protein, 11 aa, Homo sapiens
FLATEGDHLQL

SEQ ID NO: 7709 - protein, 9 aa, Homo sapiens
FLATKFSTV

SEQ ID NO: 7710 - protein, 9 aa, Homo sapiens
FLAVKPHII

SEQ ID NO: 7711 - protein, 9 aa, Homo sapiens
FLDATLTSV

SEQ ID NO: 7712 - protein, 10 aa, Homo sapiens
FLDAYAEHKL

SEQ ID NO: 7713 - protein, 10 aa, Homo sapiens
FLDDFIACVP

SEQ ID NO: 7714 - protein, 10 aa, Homo sapiens
FLDDGNQMLL

SEQ ID NO: 7715 - protein, 12 aa, Homo sapiens
FLDDLGNAKSHL

SEQ ID NO: 7716 - protein, 9 aa, Homo sapiens
FLDDLSQKL

SEQ ID NO: 7717 - protein, 10 aa, Homo sapiens
FLDDNQIITS

SEQ ID NO: 7718 - protein, 10 aa, Homo sapiens
FLDDNQIVTS

SEQ ID NO: 7719 - protein, 10 aa, Homo sapiens
FLDDSTLRFV

SEQ ID NO: 7720 - protein, 9 aa, Homo sapiens
FLDEAAARL

SEQ ID NO: 7721 - protein, 10 aa, Homo sapiens
FLDEAAARLL

SEQ ID NO: 7722 - protein, 11 aa, Homo sapiens
FLDEAAARLLT

SEQ ID NO: 7723 - protein, 12 aa, Homo sapiens
FLDEAAARLLTV

SEQ ID NO: 7724 - protein, 9 aa, Homo sapiens
FLDEDLKVA

SEQ ID NO: 7725 - protein, 10 aa, Homo sapiens
FLDEHHSVNF

SEQ ID NO: 7726 - protein, 9 aa, Homo sapiens
FLDELAQKL

SEQ ID NO: 7727 - protein, 9 aa, Homo sapiens
FLDELEDEA

SEQ ID NO: 7728 - protein, 11 aa, Homo sapiens
FLDELEDEAKA

SEQ ID NO: 7729 - protein, 9 aa, Homo sapiens
FLDELGFLE

SEQ ID NO: 7730 - protein, 10 aa, Homo sapiens
FLDELGFLEI

SEQ ID NO: 7731 - protein, 11 aa, Homo sapiens
FLDELGFLEIE

SEQ ID NO: 7732 - protein, 12 aa, Homo sapiens
FLDELGFLEIET

SEQ ID NO: 7733 - protein, 11 aa, Homo sapiens
FLDENVHFFHT

SEQ ID NO: 7734 - protein, 9 aa, Homo sapiens
FLDEQELEA

SEQ ID NO: 7735 - protein, 10 aa, Homo sapiens
FLDEQELEAL

SEQ ID NO: 7736 - protein, 11 aa, Homo sapiens
FLDEQELEALF

SEQ ID NO: 7737 - protein, 12 aa, Homo sapiens
FLDEQELEALFT

SEQ ID NO: 7738 - protein, 9 aa, Homo sapiens
FLDEVLFIE

SEQ ID NO: 7739 - protein, 11 aa, Homo sapiens
FLDEVSRQQEL

SEQ ID NO: 7740 - protein, 9 aa, Homo sapiens
FLDFIGHIL

SEQ ID NO: 7741 - protein, 11 aa, Homo sapiens
FLDGNELTLAD

SEQ ID NO: 7742 - protein, 9 aa, Homo sapiens
FLDGRIVFT

SEQ ID NO: 7743 - protein, 12 aa, Homo sapiens
FLDISRPKMQEV

SEQ ID NO: 7744 - protein, 10 aa, Homo sapiens
FLDKALELNM

SEQ ID NO: 7745 - protein, 11 aa, Homo sapiens
FLDKALELNML

SEQ ID NO: 7746 - protein, 11 aa, Homo sapiens
FLDKMPEANQL

SEQ ID NO: 7747 - protein, 10 aa, Homo sapiens
FLDKPEDVLL

SEQ ID NO: 7748 - protein, 9 aa, Homo sapiens
FLDKVLVAA

SEQ ID NO: 7749 - protein, 8 aa, Homo sapiens
FLDLGPWA

SEQ ID NO: 7750 - protein, 9 aa, Homo sapiens
FLDLGPWAV

SEQ ID NO: 7751 - protein, 9 aa, Homo sapiens
FLDLWNKFL

SEQ ID NO: 7752 - protein, 9 aa, Homo sapiens
FLDPDRHFL

SEQ ID NO: 7753 - protein, 11 aa, Homo sapiens
FLDPKVAQRVL

SEQ ID NO: 7754 - protein, 12 aa, Homo sapiens
FLDPLAGAVTKT

SEQ ID NO: 7755 - protein, 9 aa, Homo sapiens
FLDPNARPL

SEQ ID NO: 7756 - protein, 10 aa, Homo sapiens
FLDPNARPLV

SEQ ID NO: 7757 - protein, 12 aa, Homo sapiens
FLDPNARPLVPE

SEQ ID NO: 7758 - protein, 10 aa, Homo sapiens
FLDPNTLERL

SEQ ID NO: 7759 - protein, 11 aa, Homo sapiens
FLDTISDFHLL

SEQ ID NO: 7760 - protein, 11 aa, Homo sapiens
FLDVLFPLVVD

SEQ ID NO: 7761 - protein, 9 aa, Homo sapiens
FLDVRNIIL

SEQ ID NO: 7762 - protein, 9 aa, Homo sapiens
FLDYGENLV

SEQ ID NO: 7763 - protein, 9 aa, Homo sapiens
FLEANVPHA

SEQ ID NO: 7764 - protein, 11 aa, Homo sapiens
FLEDDDKLEQI

SEQ ID NO: 7765 - protein, 10 aa, Homo sapiens
FLEDDDVAAV

SEQ ID NO: 7766 - protein, 10 aa, Homo sapiens
FLEEDFIPFA

SEQ ID NO: 7767 - protein, 9 aa, Homo sapiens
FLEEEVYPL

SEQ ID NO: 7768 - protein, 9 aa, Homo sapiens
FLEEFITPI

SEQ ID NO: 7769 - protein, 12 aa, Homo sapiens
FLEEFITPIVKA

SEQ ID NO: 7770 - protein, 12 aa, Homo sapiens
FLEEFITPIVKV

SEQ ID NO: 7771 - protein, 12 aa, Homo sapiens
FLEEKIPSISDL

SEQ ID NO: 7772 - protein, 9 aa, Homo sapiens
FLEENSFSV

SEQ ID NO: 7773 - protein, 9 aa, Homo sapiens
FLEEREIAL

SEQ ID NO: 7774 - protein, 11 aa, Homo sapiens
FLEEVKVSREM

SEQ ID NO: 7775 - protein, 11 aa, Homo sapiens
FLEFAEDVIQV

SEQ ID NO: 7776 - protein, 9 aa, Homo sapiens
FLEPDSWET

SEQ ID NO: 7777 - protein, 9 aa, Homo sapiens
FLEQQMHPT

SEQ ID NO: 7778 - protein, 11 aa, Homo sapiens
FLEQQNKILLA

SEQ ID NO: 7779 - protein, 9 aa, Homo sapiens
FLEQQNKLL

SEQ ID NO: 7780 - protein, 9 aa, Homo sapiens
FLETESTFM

SEQ ID NO: 7781 - protein, 9 aa, Homo sapiens
FLETVELQI

SEQ ID NO: 7782 - protein, 11 aa, Homo sapiens
FLETVELQISL

SEQ ID NO: 7783 - protein, 8 aa, Homo sapiens
FLFDEEME

SEQ ID NO: 7784 - protein, 9 aa, Homo sapiens
FLFDEEMEQ

SEQ ID NO: 7785 - protein, 11 aa, Homo sapiens
FLFDEEMEQMD

SEQ ID NO: 7786 - protein, 12 aa, Homo sapiens
FLFDEEMEQMDG

SEQ ID NO: 7787 - protein, 12 aa, Homo sapiens
FLFDGSPTYVLA

SEQ ID NO: 7788 - protein, 11 aa, Homo sapiens
FLFDIPKILDL

SEQ ID NO: 7789 - protein, 8 aa, Homo sapiens
FLFDKPVS

SEQ ID NO: 7790 - protein, 10 aa, Homo sapiens
FLFDKPVSPL

SEQ ID NO: 7791 - protein, 11 aa, Homo sapiens
FLFDKPVSPLL

SEQ ID NO: 7792 - protein, 12 aa, Homo sapiens
FLFDKPVSPLLL

SEQ ID NO: 7793 - protein, 10 aa, Homo sapiens
FLFDMATGKL

SEQ ID NO: 7794 - protein, 11 aa, Homo sapiens
FLFDMATGKLT

SEQ ID NO: 7795 - protein, 9 aa, Homo sapiens
FLFDTKPLI

SEQ ID NO: 7796 - protein, 12 aa, Homo sapiens
FLFDTKPLIVQY

SEQ ID NO: 7797 - protein, 9 aa, Homo sapiens
FLFDVVSKI

SEQ ID NO: 7798 - protein, 9 aa, Homo sapiens
FLFENQTPA

SEQ ID NO: 7799 - protein, 11 aa, Homo sapiens
FLFENQTPAHV

SEQ ID NO: 7800 - protein, 11 aa, Homo sapiens
FLFEPVVKAFL

SEQ ID NO: 7801 - protein, 9 aa, Homo sapiens
FLFGGVLMT

SEQ ID NO: 7802 - protein, 9 aa, Homo sapiens
FLFGSPLGL

SEQ ID NO: 7803 - protein, 10 aa, Homo sapiens
FLFNTENKLL

SEQ ID NO: 7804 - protein, 11 aa, Homo sapiens
FLFPELRIIST

SEQ ID NO: 7805 - protein, 11 aa, Homo sapiens
FLFPGTENQEL

SEQ ID NO: 7806 - protein, 9 aa, Homo sapiens
FLFRDGDIL

SEQ ID NO: 7807 - protein, 11 aa, Homo sapiens
FLFSSDHLIEM

SEQ ID NO: 7808 - protein, 12 aa, Homo sapiens
FLFVDADQIVRT

SEQ ID NO: 7809 - protein, 11 aa, Homo sapiens
FLGADVTHPPA

SEQ ID NO: 7810 - protein, 8 aa, Homo sapiens
FLGAVEEA

SEQ ID NO: 7811 - protein, 11 aa, Homo sapiens
FLGDDVFLREL

SEQ ID NO: 7812 - protein, 11 aa, Homo sapiens
FLGDEETVRKA

SEQ ID NO: 7813 - protein, 10 aa, Homo sapiens
FLGDGLGVPT

SEQ ID NO: 7814 - protein, 11 aa, Homo sapiens
FLGDGLGVPTV

SEQ ID NO: 7815 - protein, 8 aa, Homo sapiens
FLGDGMGV

SEQ ID NO: 7816 - protein, 10 aa, Homo sapiens
FLGDGMGVST

SEQ ID NO: 7817 - protein, 11 aa, Homo sapiens
FLGDGMGVSTV

SEQ ID NO: 7818 - protein, 11 aa, Homo sapiens
FLGDTDVFGAA

SEQ ID NO: 7819 - protein, 12 aa, Homo sapiens
FLGDTDVFGAAS

SEQ ID NO: 7820 - protein, 10 aa, Homo sapiens
FLGEIEELRL

SEQ ID NO: 7821 - protein, 12 aa, Homo sapiens
FLGEMPAEPMTI

SEQ ID NO: 7822 - protein, 9 aa, Homo sapiens
FLGFFMVPA

SEQ ID NO: 7823 - protein, 9 aa, Homo sapiens
FLGGDMEHT

SEQ ID NO: 7824 - protein, 12 aa, Homo sapiens
FLGGDMEHTHLV

SEQ ID NO: 7825 - protein, 11 aa, Homo sapiens
FLGGEDFDQAL

SEQ ID NO: 7826 - protein, 12 aa, Homo sapiens
FLGGEDFDQALL

SEQ ID NO: 7827 - protein, 9 aa, Homo sapiens
FLGKVVNPT

SEQ ID NO: 7828 - protein, 9 aa, Homo sapiens
FLGPEDLRV

SEQ ID NO: 7829 - protein, 9 aa, Homo sapiens
FLGPEPKSV

SEQ ID NO: 7830 - protein, 8 aa, Homo sapiens
FLGPIIKA

SEQ ID NO: 7831 - protein, 11 aa, Homo sapiens
FLGPPPPPLLL

SEQ ID NO: 7832 - protein, 12 aa, Homo sapiens
FLGPPPPPLLLL

SEQ ID NO: 7833 - protein, 9 aa, Homo sapiens
FLGQKLQVV

SEQ ID NO: 7834 - protein, 10 aa, Homo sapiens
FLGSLSLLPA

SEQ ID NO: 7835 - protein, 8 aa, Homo sapiens
FLGTTPTL

SEQ ID NO: 7836 - protein, 8 aa, Homo sapiens
FLGVAEQL

SEQ ID NO: 7837 - protein, 9 aa, Homo sapiens
FLHEATARL

SEQ ID NO: 7838 - protein, 10 aa, Homo sapiens
FLHELNVPFF

SEQ ID NO: 7839 - protein, 12 aa, Homo sapiens
FLHELNVPFFKV

SEQ ID NO: 7840 - protein, 10 aa, Homo sapiens
FLHNNRITHL

SEQ ID NO: 7841 - protein, 10 aa, Homo sapiens
FLHPEEFEHM

SEQ ID NO: 7842 - protein, 10 aa, Homo sapiens
FLHPEEFPHM

SEQ ID NO: 7843 - protein, 10 aa, Homo sapiens
FLIAEYFEHV

SEQ ID NO: 7844 - protein, 10 aa, Homo sapiens
FLIAQLPKLQ

SEQ ID NO: 7845 - protein, 9 aa, Homo sapiens
FLIEPFVPH

SEQ ID NO: 7846 - protein, 10 aa, Homo sapiens
FLIEPFVPHS

SEQ ID NO: 7847 - protein, 11 aa, Homo sapiens
FLIEPFVPHSQ

SEQ ID NO: 7848 - protein, 12 aa, Homo sapiens
FLIEPFVPHSQA

SEQ ID NO: 7849 - protein, 11 aa, Homo sapiens
FLIGDEAATHL

SEQ ID NO: 7850 - protein, 9 aa, Homo sapiens
FLIPVLNGL

SEQ ID NO: 7851 - protein, 11 aa, Homo sapiens
FLIPVQTQHPI

SEQ ID NO: 7852 - protein, 10 aa, Homo sapiens
FLITHNPTNA

SEQ ID NO: 7853 - protein, 9 aa, Homo sapiens
FLKALQEKV

SEQ ID NO: 7854 - protein, 10 aa, Homo sapiens
FLKDCVGPEV

SEQ ID NO: 7855 - protein, 9 aa, Homo sapiens
FLKELVEPV

SEQ ID NO: 7856 - protein, 9 aa, Homo sapiens
FLKEPILNI

SEQ ID NO: 7857 - protein, 11 aa, Homo sapiens
FLKPSTSGDSL

SEQ ID NO: 7858 - protein, 9 aa, Homo sapiens
FLKQVSNMV

SEQ ID NO: 7859 - protein, 10 aa, Homo sapiens
FLKTLEDPDL

SEQ ID NO: 7860 - protein, 10 aa, Homo sapiens
FLKVLNNMEI

SEQ ID NO: 7861 - protein, 9 aa, Homo sapiens
FLLAEDTKV

SEQ ID NO: 7862 - protein, 9 aa, Homo sapiens
FLLAKVINA

SEQ ID NO: 7863 - protein, 10 aa, Homo sapiens
FLLDADMQSL

SEQ ID NO: 7864 - protein, 11 aa, Homo sapiens
FLLDAYKQVKL

SEQ ID NO: 7865 - protein, 9 aa, Homo sapiens
FLLDEISLA

SEQ ID NO: 7866 - protein, 9 aa, Homo sapiens
FLLDEQTSL

SEQ ID NO: 7867 - protein, 10 aa, Homo sapiens
FLLDESLESL

SEQ ID NO: 7868 - protein, 9 aa, Homo sapiens
FLLDGFPRT

SEQ ID NO: 7869 - protein, 10 aa, Homo sapiens
FLLDGLHEDL

SEQ ID NO: 7870 - protein, 10 aa, Homo sapiens
FLLDISETDL

SEQ ID NO: 7871 - protein, 12 aa, Homo sapiens
FLLDISETDLSS

SEQ ID NO: 7872 - protein, 12 aa, Homo sapiens
FLLDKKIGVNQP

SEQ ID NO: 7873 - protein, 12 aa, Homo sapiens
FLLEIKETTESL

SEQ ID NO: 7874 - protein, 11 aa, Homo sapiens
FLLEQPEIQVA

SEQ ID NO: 7875 - protein, 10 aa, Homo sapiens
FLLETDNPRT

SEQ ID NO: 7876 - protein, 12 aa, Homo sapiens
FLLETDNPRTTL

SEQ ID NO: 7877 - protein, 11 aa, Homo sapiens
FLLFEGEKITI

SEQ ID NO: 7878 - protein, 8 aa, Homo sapiens
FLLGFQFI

SEQ ID NO: 7879 - protein, 10 aa, Homo sapiens
FLLGLLTNEL

SEQ ID NO: 7880 - protein, 11 aa, Homo sapiens
FLLGPEALSFA

SEQ ID NO: 7881 - protein, 12 aa, Homo sapiens
FLLKDSETSQRL

SEQ ID NO: 7882 - protein, 9 aa, Homo sapiens
FLLNYPFST

SEQ ID NO: 7883 - protein, 10 aa, Homo sapiens
FLLNYPFSTS

SEQ ID NO: 7884 - protein, 11 aa, Homo sapiens
FLLNYPFSTSV

SEQ ID NO: 7885 - protein, 11 aa, Homo sapiens
FLLPHPGLQVA

SEQ ID NO: 7886 - protein, 12 aa, Homo sapiens
FLLPILSQIYSD

SEQ ID NO: 7887 - protein, 9 aa, Homo sapiens
FLLPKFHGV

SEQ ID NO: 7888 - protein, 10 aa, Homo sapiens
FLLPPPLPSL

SEQ ID NO: 7889 - protein, 9 aa, Homo sapiens
FLLSKGLQV

SEQ ID NO: 7890 - protein, 10 aa, Homo sapiens
FLLTTTPRPV

SEQ ID NO: 7891 - protein, 10 aa, Homo sapiens
FLLVGTQIDL

SEQ ID NO: 7892 - protein, 11 aa, Homo sapiens
FLMANGQLVKM

SEQ ID NO: 7893 - protein, 10 aa, Homo sapiens
FLMDAIQTNF

SEQ ID NO: 7894 - protein, 11 aa, Homo sapiens
FLMECRNSPVT

SEQ ID NO: 7895 - protein, 9 aa, Homo sapiens
FLMKKELNY

SEQ ID NO: 7896 - protein, 10 aa, Homo sapiens
FLMKKELNYF

SEQ ID NO: 7897 - protein, 11 aa, Homo sapiens
FLMKKELNYFA

SEQ ID NO: 7898 - protein, 9 aa, Homo sapiens
FLMKLSHET

SEQ ID NO: 7899 - protein, 10 aa, Homo sapiens
FLMKLSHETV

SEQ ID NO: 7900 - protein, 10 aa, Homo sapiens
FLMPFPVNYV

SEQ ID NO: 7901 - protein, 10 aa, Homo sapiens
FLMSDKPLHL

SEQ ID NO: 7902 - protein, 9 aa, Homo sapiens
FLMSLVNQV

SEQ ID NO: 7903 - protein, 9 aa, Homo sapiens
FLMTGYTPL

SEQ ID NO: 7904 - protein, 11 aa, Homo sapiens
FLNDTTKPVGL

SEQ ID NO: 7905 - protein, 10 aa, Homo sapiens
FLNEDLEVKI

SEQ ID NO: 7906 - protein, 11 aa, Homo sapiens
FLNEHPGGEEV

SEQ ID NO: 7907 - protein, 12 aa, Homo sapiens
FLNEHPGGEEVL

SEQ ID NO: 7908 - protein, 9 aa, Homo sapiens
FLNELIKVV

SEQ ID NO: 7909 - protein, 10 aa, Homo sapiens
FLNENLPESI

SEQ ID NO: 7910 - protein, 9 aa, Homo sapiens
FLNEVLVKL

SEQ ID NO: 7911 - protein, 11 aa, Homo sapiens
FLNGGILNYMI

SEQ ID NO: 7912 - protein, 9 aa, Homo sapiens
FLNGKSIGL

SEQ ID NO: 7913 - protein, 9 aa, Homo sapiens
FLNGKSVGV

SEQ ID NO: 7914 - protein, 10 aa, Homo sapiens
FLNGLTGKPV

SEQ ID NO: 7915 - protein, 12 aa, Homo sapiens
FLNGLTGKPVMV

SEQ ID NO: 7916 - protein, 10 aa, Homo sapiens
FLNKQAPQTI

SEQ ID NO: 7917 - protein, 10 aa, Homo sapiens
FLNPNDPYHA

SEQ ID NO: 7918 - protein, 10 aa, Homo sapiens
FLNQFVVHTV

SEQ ID NO: 7919 - protein, 9 aa, Homo sapiens
FLNYFDKIL

SEQ ID NO: 7920 - protein, 8 aa, Homo sapiens
FLPEAFDF

SEQ ID NO: 7921 - protein, 9 aa, Homo sapiens
FLPEAFDFI

SEQ ID NO: 7922 - protein, 10 aa, Homo sapiens
FLPEAPAELL

SEQ ID NO: 7923 - protein, 9 aa, Homo sapiens
FLPEEYPMA

SEQ ID NO: 7924 - protein, 11 aa, Homo sapiens
FLPEGSKLVPV

SEQ ID NO: 7925 - protein, 12 aa, Homo sapiens
FLPEGSKLVPVA

SEQ ID NO: 7926 - protein, 9 aa, Homo sapiens
FLPEMLSKV

SEQ ID NO: 7927 - protein, 9 aa, Homo sapiens
FLPFPFEQL

SEQ ID NO: 7928 - protein, 9 aa, Homo sapiens
FLPHFQHFA

SEQ ID NO: 7929 - protein, 9 aa, Homo sapiens
FLPITPHYV

SEQ ID NO: 7930 - protein, 9 aa, Homo sapiens
FLPITPQFV

SEQ ID NO: 7931 - protein, 9 aa, Homo sapiens
FLPKDVALA

SEQ ID NO: 7932 - protein, 9 aa, Homo sapiens
FLPLFDRVL

SEQ ID NO: 7933 - protein, 10 aa, Homo sapiens
FLPLFDRVLV

SEQ ID NO: 7934 - protein, 11 aa, Homo sapiens
FLPPAAPGGEV

SEQ ID NO: 7935 - protein, 9 aa, Homo sapiens
FLPPPPPPL

SEQ ID NO: 7936 - protein, 12 aa, Homo sapiens
FLPPPPPPLDDS

SEQ ID NO: 7937 - protein, 10 aa, Homo sapiens
FLPRQPPMSL

SEQ ID NO: 7938 - protein, 9 aa, Homo sapiens
FLPSFLSYI

SEQ ID NO: 7939 - protein, 9 aa, Homo sapiens
FLPSPSPPA

SEQ ID NO: 7940 - protein, 9 aa, Homo sapiens
FLQARTPTL

SEQ ID NO: 7941 - protein, 10 aa, Homo sapiens
FLQARTPTLA

SEQ ID NO: 7942 - protein, 10 aa, Homo sapiens
FLQDGEVQFL

SEQ ID NO: 7943 - protein, 9 aa, Homo sapiens
FLQDGTKTV

SEQ ID NO: 7944 - protein, 12 aa, Homo sapiens
FLQDTIEEMALK

SEQ ID NO: 7945 - protein, 9 aa, Homo sapiens
FLQEEAEKM

SEQ ID NO: 7946 - protein, 11 aa, Homo sapiens
FLQEETVSQQI

SEQ ID NO: 7947 - protein, 9 aa, Homo sapiens
FLQEFSQQT

SEQ ID NO: 7948 - protein, 12 aa, Homo sapiens
FLQEHGSDSFLA

SEQ ID NO: 7949 - protein, 9 aa, Homo sapiens
FLQEKGPSV

SEQ ID NO: 7950 - protein, 11 aa, Homo sapiens
FLQEKSPAVAT

SEQ ID NO: 7951 - protein, 10 aa, Homo sapiens
FLQELQLEHA

SEQ ID NO: 7952 - protein, 9 aa, Homo sapiens
FLQENDQSL

SEQ ID NO: 7953 - protein, 12 aa, Homo sapiens
FLQENDQSLLNF

SEQ ID NO: 7954 - protein, 10 aa, Homo sapiens
FLQEQLVELK

SEQ ID NO: 7955 - protein, 10 aa, Homo sapiens
FLQEYVANLL

SEQ ID NO: 7956 - protein, 10 aa, Homo sapiens
FLQKAPVPST

SEQ ID NO: 7957 - protein, 9 aa, Homo sapiens
FLQLDVKRV

SEQ ID NO: 7958 - protein, 12 aa, Homo sapiens
FLQLFEGDDHKV

SEQ ID NO: 7959 - protein, 9 aa, Homo sapiens
FLQPDLDSL

SEQ ID NO: 7960 - protein, 9 aa, Homo sapiens
FLQPGGYHV

SEQ ID NO: 7961 - protein, 12 aa, Homo sapiens
FLQPVGLGNVTL

SEQ ID NO: 7962 - protein, 12 aa, Homo sapiens
FLQPVHKIDMNL

SEQ ID NO: 7963 - protein, 9 aa, Homo sapiens
FLQRFIDPL

SEQ ID NO: 7964 - protein, 10 aa, Homo sapiens
FLQSVQVPEF

SEQ ID NO: 7965 - protein, 9 aa, Homo sapiens
FLQTVINKV

SEQ ID NO: 7966 - protein, 9 aa, Homo sapiens
FLRASEEHL

SEQ ID NO: 7967 - protein, 10 aa, Homo sapiens
FLRDYTQINV

SEQ ID NO: 7968 - protein, 9 aa, Homo sapiens
FLRELISNA

SEQ ID NO: 7969 - protein, 12 aa, Homo sapiens
FLRELISNSSDA

SEQ ID NO: 7970 - protein, 11 aa, Homo sapiens
FLREPDSDTEL

SEQ ID NO: 7971 - protein, 11 aa, Homo sapiens
FLSCPIPKLLL

SEQ ID NO: 7972 - protein, 10 aa, Homo sapiens
FLSDAIPGLK

SEQ ID NO: 7973 - protein, 8 aa, Homo sapiens
FLSDFEMM

SEQ ID NO: 7974 - protein, 9 aa, Homo sapiens
FLSDFEMML

SEQ ID NO: 7975 - protein, 10 aa, Homo sapiens
FLSDPQVHTV

SEQ ID NO: 7976 - protein, 12 aa, Homo sapiens
FLSDPQVHTVLV

SEQ ID NO: 7977 - protein, 10 aa, Homo sapiens
FLSEEDADYA

SEQ ID NO: 7978 - protein, 11 aa, Homo sapiens
FLSEEDADYAI

SEQ ID NO: 7979 - protein, 9 aa, Homo sapiens
FLSEEDRGL

SEQ ID NO: 7980 - protein, 11 aa, Homo sapiens
FLSEEEKDLIL

SEQ ID NO: 7981 - protein, 9 aa, Homo sapiens
FLSEETEAS

SEQ ID NO: 7982 - protein, 10 aa, Homo sapiens
FLSEETEASL

SEQ ID NO: 7983 - protein, 11 aa, Homo sapiens
FLSEETEASLA

SEQ ID NO: 7984 - protein, 12 aa, Homo sapiens
FLSEETEASLAS

SEQ ID NO: 7985 - protein, 9 aa, Homo sapiens
FLSEKDSLL

SEQ ID NO: 7986 - protein, 8 aa, Homo sapiens
FLSELTQQ

SEQ ID NO: 7987 - protein, 11 aa, Homo sapiens
FLSELTQQLAQ

SEQ ID NO: 7988 - protein, 9 aa, Homo sapiens
FLSFPTTKT

SEQ ID NO: 7989 - protein, 8 aa, Homo sapiens
FLSGFQVV

SEQ ID NO: 7990 - protein, 9 aa, Homo sapiens
FLSGFQVVV

SEQ ID NO: 7991 - protein, 10 aa, Homo sapiens
FLSGFQVVVL

SEQ ID NO: 7992 - protein, 8 aa, Homo sapiens
FLSGVNIQ

SEQ ID NO: 7993 - protein, 9 aa, Homo sapiens
FLSGVNIQI

SEQ ID NO: 7994 - protein, 10 aa, Homo sapiens
FLSGVNIQIV

SEQ ID NO: 7995 - protein, 11 aa, Homo sapiens
FLSGVNIQIVG

SEQ ID NO: 7996 - protein, 12 aa, Homo sapiens
FLSGVNIQIVGD

SEQ ID NO: 7997 - protein, 11 aa, Homo sapiens
FLSHVVSQHQA

SEQ ID NO: 7998 - protein, 9 aa, Homo sapiens
FLSISSPKV

SEQ ID NO: 7999 - protein, 9 aa, Homo sapiens
FLSLINVGL

SEQ ID NO: 8000 - protein, 10 aa, Homo sapiens
FLSLINVGLI

SEQ ID NO: 8001 - protein, 11 aa, Homo sapiens
FLSLINVGLIS

SEQ ID NO: 8002 - protein, 12 aa, Homo sapiens
FLSLINVGLISV

SEQ ID NO: 8003 - protein, 11 aa, Homo sapiens
FLSPQQPPLLL

SEQ ID NO: 8004 - protein, 10 aa, Homo sapiens
FLSQGQVLKL

SEQ ID NO: 8005 - protein, 9 aa, Homo sapiens
FLSSLTETI

SEQ ID NO: 8006 - protein, 8 aa, Homo sapiens
FLSTINVG

SEQ ID NO: 8007 - protein, 10 aa, Homo sapiens
FLSTINVGLT

SEQ ID NO: 8008 - protein, 11 aa, Homo sapiens
FLSTINVGLTS

SEQ ID NO: 8009 - protein, 12 aa, Homo sapiens
FLSTINVGLTSI

SEQ ID NO: 8010 - protein, 11 aa, Homo sapiens
FLSTSIAQLKV

SEQ ID NO: 8011 - protein, 9 aa, Homo sapiens
FLTDLFAQL

SEQ ID NO: 8012 - protein, 12 aa, Homo sapiens
FLTDSNNIKEVL

SEQ ID NO: 8013 - protein, 11 aa, Homo sapiens
FLTDTAKQIKT

SEQ ID NO: 8014 - protein, 8 aa, Homo sapiens
FLTEFINY

SEQ ID NO: 8015 - protein, 9 aa, Homo sapiens
FLTEFINYI

SEQ ID NO: 8016 - protein, 10 aa, Homo sapiens
FLTEIEVLDV

SEQ ID NO: 8017 - protein, 8 aa, Homo sapiens
FLTELVIS

SEQ ID NO: 8018 - protein, 9 aa, Homo sapiens
FLTELVISL

SEQ ID NO: 8019 - protein, 12 aa, Homo sapiens
FLTELVISLEKL

SEQ ID NO: 8020 - protein, 11 aa, Homo sapiens
FLTFDDLLNRL

SEQ ID NO: 8021 - protein, 9 aa, Homo sapiens
FLVADKVIV

SEQ ID NO: 8022 - protein, 10 aa, Homo sapiens
FLVADKVIVT

SEQ ID NO: 8023 - protein, 11 aa, Homo sapiens
FLVADKVIVTS

SEQ ID NO: 8024 - protein, 9 aa, Homo sapiens
FLVDDSSSV

SEQ ID NO: 8025 - protein, 11 aa, Homo sapiens
FLVDFGKEPLG

SEQ ID NO: 8026 - protein, 11 aa, Homo sapiens
FLVDPVRNQRL

SEQ ID NO: 8027 - protein, 9 aa, Homo sapiens
FLVELSRVL

SEQ ID NO: 8028 - protein, 10 aa, Homo sapiens
FLVELSRVLA

SEQ ID NO: 8029 - protein, 9 aa, Homo sapiens
FLVGERVTL

SEQ ID NO: 8030 - protein, 11 aa, Homo sapiens
FLVHPIEGSTT

SEQ ID NO: 8031 - protein, 11 aa, Homo sapiens
FLVNPESGYNV

SEQ ID NO: 8032 - protein, 9 aa, Homo sapiens
FLVSQLIRA

SEQ ID NO: 8033 - protein, 11 aa, Homo sapiens
FLVTEVENGGS

SEQ ID NO: 8034 - protein, 12 aa, Homo sapiens
FLVTEVENGGSL

SEQ ID NO: 8035 - protein, 11 aa, Homo sapiens
FLWDEGFHQLV

SEQ ID NO: 8036 - protein, 12 aa, Homo sapiens
FLWDEGFHQLVV

SEQ ID NO: 8037 - protein, 12 aa, Homo sapiens
FLWDLGSGSTRL

SEQ ID NO: 8038 - protein, 11 aa, Homo sapiens
FLWDPAKRTSV

SEQ ID NO: 8039 - protein, 12 aa, Homo sapiens
FLWDVNTLTALT

SEQ ID NO: 8040 - protein, 10 aa, Homo sapiens
FLWDVPSNWT

SEQ ID NO: 8041 - protein, 12 aa, Homo sapiens
FLWDVPSNWTLE

SEQ ID NO: 8042 - protein, 10 aa, Homo sapiens
FLWEVGEAEA

SEQ ID NO: 8043 - protein, 11 aa, Homo sapiens
FLWEYGDLHLF

SEQ ID NO: 8044 - protein, 10 aa, Homo sapiens
FLWPGFGENA

SEQ ID NO: 8045 - protein, 10 aa, Homo sapiens
FLYDLVMTHA

SEQ ID NO: 8046 - protein, 11 aa, Homo sapiens
FLYDLVMTHAL

SEQ ID NO: 8047 - protein, 12 aa, Homo sapiens
FLYDLVMTHALE

SEQ ID NO: 8048 - protein, 12 aa, Homo sapiens
FLYDLVMTHALQ

SEQ ID NO: 8049 - protein, 9 aa, Homo sapiens
FLYEADVQV

SEQ ID NO: 8050 - protein, 12 aa, Homo sapiens
FLYGDHDGEVYA

SEQ ID NO: 8051 - protein, 11 aa, Homo sapiens
FLYPLVGTMST

SEQ ID NO: 8052 - protein, 11 aa, Homo sapiens
FLYSDREIEVM

SEQ ID NO: 8053 - protein, 8 aa, Homo sapiens
FMANIPLL

SEQ ID NO: 8054 - protein, 9 aa, Homo sapiens
FMANIPLLL

SEQ ID NO: 8055 - protein, 11 aa, Homo sapiens
FMANIPLLLYP

SEQ ID NO: 8056 - protein, 12 aa, Homo sapiens
FMANIPLLLYPQ

SEQ ID NO: 8057 - protein, 11 aa, Homo sapiens
FMATNDLMTEL

SEQ ID NO: 8058 - protein, 8 aa, Homo sapiens
FMATVTKA

SEQ ID NO: 8059 - protein, 9 aa, Homo sapiens
FMDDFFHQV

SEQ ID NO: 8060 - protein, 9 aa, Homo sapiens
FMDKLGENL

SEQ ID NO: 8061 - protein, 11 aa, Homo sapiens
FMDKLGENLKI

SEQ ID NO: 8062 - protein, 10 aa, Homo sapiens
FMEAIAPPLL

SEQ ID NO: 8063 - protein, 9 aa, Homo sapiens
FMEDMMPKV

SEQ ID NO: 8064 - protein, 12 aa, Homo sapiens
FMEEIDKEISEM

SEQ ID NO: 8065 - protein, 9 aa, Homo sapiens
FMILPVGAA

SEQ ID NO: 8066 - protein, 11 aa, Homo sapiens
FMILPVGAANF

SEQ ID NO: 8067 - protein, 11 aa, Homo sapiens
FMLATQLNPLV

SEQ ID NO: 8068 - protein, 10 aa, Homo sapiens
FMMEVKDPNM

SEQ ID NO: 8069 - protein, 10 aa, Homo sapiens
FMNPFNMPNL

SEQ ID NO: 8070 - protein, 11 aa, Homo sapiens
FMQGEIATILA

SEQ ID NO: 8071 - protein, 11 aa, Homo sapiens
FMVPSEAISLS

SEQ ID NO: 8072 - protein, 9 aa, Homo sapiens
FMVTRSYTV

SEQ ID NO: 8073 - protein, 9 aa, Homo sapiens
FMWDVAEEL

SEQ ID NO: 8074 - protein, 11 aa, Homo sapiens
FMWDVAEELKA

SEQ ID NO: 8075 - protein, 12 aa, Homo sapiens
FMWNPHLGYILT

SEQ ID NO: 8076 - protein, 10 aa, Homo sapiens
FNFGKEKFEV

SEQ ID NO: 8077 - protein, 11 aa, Homo sapiens
FQAHKEAIREA

SEQ ID NO: 8078 - protein, 11 aa, Homo sapiens
FQDEEEENEEV

SEQ ID NO: 8079 - protein, 10 aa, Homo sapiens
FQKENGTVTA

SEQ ID NO: 8080 - protein, 9 aa, Homo sapiens
FQQKQIENV

SEQ ID NO: 8081 - protein, 9 aa, Homo sapiens
FQVGSMPPA

SEQ ID NO: 8082 - protein, 9 aa, Homo sapiens
FQYDHEAFL

SEQ ID NO: 8083 - protein, 10 aa, Homo sapiens
FQYTDEHGEV

SEQ ID NO: 8084 - protein, 11 aa, Homo sapiens
FSHEEIAMATV

SEQ ID NO: 8085 - protein, 11 aa, Homo sapiens
FSSEVTAALRV

SEQ ID NO: 8086 - protein, 9 aa, Homo sapiens
FTASAGIQV

SEQ ID NO: 8087 - protein, 10 aa, Homo sapiens
FTASAGIQVV

SEQ ID NO: 8088 - protein, 11 aa, Homo sapiens
FTLDDVIQTGV

SEQ ID NO: 8089 - protein, 12 aa, Homo sapiens
FTYEGNSNDIRV

SEQ ID NO: 8090 - protein, 9 aa, Homo sapiens
FVAAAPVAA

SEQ ID NO: 8091 - protein, 11 aa, Homo sapiens
FVAELKGLDPA

SEQ ID NO: 8092 - protein, 9 aa, Homo sapiens
FVAESAEVL

SEQ ID NO: 8093 - protein, 9 aa, Homo sapiens
FVAPQPVVV

SEQ ID NO: 8094 - protein, 9 aa, Homo sapiens
FVAQFKFTV

SEQ ID NO: 8095 - protein, 9 aa, Homo sapiens
FVDPNKQNL

SEQ ID NO: 8096 - protein, 10 aa, Homo sapiens
FVDPNKQNLI

SEQ ID NO: 8097 - protein, 10 aa, Homo sapiens
FVDPNTQEKV

SEQ ID NO: 8098 - protein, 9 aa, Homo sapiens
FVDPWTVQT

SEQ ID NO: 8099 - protein, 11 aa, Homo sapiens
FVDRPVIGSSV

SEQ ID NO: 8100 - protein, 10 aa, Homo sapiens
FVDVSSVPLA

SEQ ID NO: 8101 - protein, 11 aa, Homo sapiens
FVDVSSVPLAI

SEQ ID NO: 8102 - protein, 9 aa, Homo sapiens
FVDYQTTMV

SEQ ID NO: 8103 - protein, 9 aa, Homo sapiens
FVEEFIWPA

SEQ ID NO: 8104 - protein, 10 aa, Homo sapiens
FVFDRPLPVS

SEQ ID NO: 8105 - protein, 11 aa, Homo sapiens
FVGSPPKGLSI

SEQ ID NO: 8106 - protein, 9 aa, Homo sapiens
FVGYFPATV

SEQ ID NO: 8107 - protein, 9 aa, Homo sapiens
FVIEAGALM

SEQ ID NO: 8108 - protein, 10 aa, Homo sapiens
FVIEEVPGEL

SEQ ID NO: 8109 - protein, 11 aa, Homo sapiens
FVIEEVPGELM

SEQ ID NO: 8110 - protein, 9 aa, Homo sapiens
FVKDGMDTV

SEQ ID NO: 8111 - protein, 10 aa, Homo sapiens
FVLDEADEML

SEQ ID NO: 8112 - protein, 11 aa, Homo sapiens
FVLDYINGGEL

SEQ ID NO: 8113 - protein, 9 aa, Homo sapiens
FVNITPAEV

SEQ ID NO: 8114 - protein, 9 aa, Homo sapiens
FVPKFSISA

SEQ ID NO: 8115 - protein, 10 aa, Homo sapiens
FVQNSQPVAV

SEQ ID NO: 8116 - protein, 11 aa, Homo sapiens
FVQSEIFPLET

SEQ ID NO: 8117 - protein, 11 aa, Homo sapiens
FVVDVAQGTQV

SEQ ID NO: 8118 - protein, 10 aa, Homo sapiens
FVVEAIGDDV

SEQ ID NO: 8119 - protein, 10 aa, Homo sapiens
FVVESIGSEV

SEQ ID NO: 8120 - protein, 11 aa, Homo sapiens
FVVGFISGSRV

SEQ ID NO: 8121 - protein, 12 aa, Homo sapiens
FVWEPAMVRINA

SEQ ID NO: 8122 - protein, 10 aa, Homo sapiens
FVYGGPQVQL

SEQ ID NO: 8123 - protein, 10 aa, Homo sapiens
GAAGGEIPAV

SEQ ID NO: 8124 - protein, 9 aa, Homo sapiens
GGFEITPPV

SEQ ID NO: 8125 - protein, 9 aa, Homo sapiens
GIALNDHFV

SEQ ID NO: 8126 - protein, 9 aa, Homo sapiens
GIFEVKATA

SEQ ID NO: 8127 - protein, 9 aa, Homo sapiens
GIIDPGSTV

SEQ ID NO: 8128 - protein, 11 aa, Homo sapiens
GIIDPGSTVTV

SEQ ID NO: 8129 - protein, 9 aa, Homo sapiens
GIIGGLTSV

SEQ ID NO: 8130 - protein, 10 aa, Homo sapiens
GIKDDVFLSV

SEQ ID NO: 8131 - protein, 11 aa, Homo sapiens
GILDTETLEKV

SEQ ID NO: 8132 - protein, 10 aa, Homo sapiens
GILGYTEHQV

SEQ ID NO: 8133 - protein, 11 aa, Homo sapiens
GILGYTEHQVV

SEQ ID NO: 8134 - protein, 12 aa, Homo sapiens
GIMDAANFEQFL

SEQ ID NO: 8135 - protein, 9 aa, Homo sapiens
GIMVELPQL

SEQ ID NO: 8136 - protein, 11 aa, Homo sapiens
GIQVVGDDLTV

SEQ ID NO: 8137 - protein, 10 aa, Homo sapiens
GISEETTTGV

SEQ ID NO: 8138 - protein, 9 aa, Homo sapiens
GIVEGLMTT

SEQ ID NO: 8139 - protein, 11 aa, Homo sapiens
GLAAAIAGAKL

SEQ ID NO: 8140 - protein, 9 aa, Homo sapiens
GLAAGPPEA

SEQ ID NO: 8141 - protein, 9 aa, Homo sapiens
GLAAISLYL

SEQ ID NO: 8142 - protein, 10 aa, Homo sapiens
GLAALAKVLL

SEQ ID NO: 8143 - protein, 9 aa, Homo sapiens
GLAATLYSL

SEQ ID NO: 8144 - protein, 12 aa, Homo sapiens
GLAATVTITHLL

SEQ ID NO: 8145 - protein, 9 aa, Homo sapiens
GLADNTVIA

SEQ ID NO: 8146 - protein, 9 aa, Homo sapiens
GLAEALGTL

SEQ ID NO: 8147 - protein, 11 aa, Homo sapiens
GLAEAPEHGTT

SEQ ID NO: 8148 - protein, 12 aa, Homo sapiens
GLAEAPEHGTTA

SEQ ID NO: 8149 - protein, 10 aa, Homo sapiens
GLAEDIENEV

SEQ ID NO: 8150 - protein, 11 aa, Homo sapiens
GLAEDIENEVV

SEQ ID NO: 8151 - protein, 11 aa, Homo sapiens
GLAEEDLETLL

SEQ ID NO: 8152 - protein, 10 aa, Homo sapiens
GLAEHLSPLM

SEQ ID NO: 8153 - protein, 11 aa, Homo sapiens
GLAEHLSPLML

SEQ ID NO: 8154 - protein, 11 aa, Homo sapiens
GLAEVMAGLGV

SEQ ID NO: 8155 - protein, 11 aa, Homo sapiens
GLAGAGNSVLL

SEQ ID NO: 8156 - protein, 9 aa, Homo sapiens
GLAGLATDV

SEQ ID NO: 8157 - protein, 11 aa, Homo sapiens
GLAGLGDVAEV

SEQ ID NO: 8158 - protein, 9 aa, Homo sapiens
GLAGLIGLA

SEQ ID NO: 8159 - protein, 10 aa, Homo sapiens
GLAGLIGLAV

SEQ ID NO: 8160 - protein, 12 aa, Homo sapiens
GLAGQLLSDILA

SEQ ID NO: 8161 - protein, 9 aa, Homo sapiens
GLALLLPPV

SEQ ID NO: 8162 - protein, 10 aa, Homo sapiens
GLALLLPPVT

SEQ ID NO: 8163 - protein, 11 aa, Homo sapiens
GLALLLPPVTL

SEQ ID NO: 8164 - protein, 12 aa, Homo sapiens
GLALLLPPVTLA

SEQ ID NO: 8165 - protein, 10 aa, Homo sapiens
GLAPFSFPQV

SEQ ID NO: 8166 - protein, 11 aa, Homo sapiens
GLAPVEVEELL

SEQ ID NO: 8167 - protein, 10 aa, Homo sapiens
GLAPVPMIIF

SEQ ID NO: 8168 - protein, 11 aa, Homo sapiens
GLAPVPMIIFA

SEQ ID NO: 8169 - protein, 10 aa, Homo sapiens
GLASAPIEEV

SEQ ID NO: 8170 - protein, 12 aa, Homo sapiens
GLASICNGGGGA

SEQ ID NO: 8171 - protein, 10 aa, Homo sapiens
GLASLEQLYL

SEQ ID NO: 8172 - protein, 9 aa, Homo sapiens
GLASVEPYV

SEQ ID NO: 8173 - protein, 9 aa, Homo sapiens
GLATEPESV

SEQ ID NO: 8174 - protein, 11 aa, Homo sapiens
GLATGIAGGLA

SEQ ID NO: 8175 - protein, 10 aa, Homo sapiens
GLAVEGPSEA

SEQ ID NO: 8176 - protein, 9 aa, Homo sapiens
GLDDDEPSL

SEQ ID NO: 8177 - protein, 10 aa, Homo sapiens
GLDEAKEILL

SEQ ID NO: 8178 - protein, 10 aa, Homo sapiens
GLDEDETNFL

SEQ ID NO: 8179 - protein, 10 aa, Homo sapiens
GLDEEAEQKL

SEQ ID NO: 8180 - protein, 12 aa, Homo sapiens
GLDEIDHAEMEL

SEQ ID NO: 8181 - protein, 8 aa, Homo sapiens
GLDELFVQ

SEQ ID NO: 8182 - protein, 8 aa, Homo sapiens
GLDFEAIL

SEQ ID NO: 8183 - protein, 9 aa, Homo sapiens
GLDFSLPGM

SEQ ID NO: 8184 - protein, 11 aa, Homo sapiens
GLDGEIGNFEV

SEQ ID NO: 8185 - protein, 10 aa, Homo sapiens
GLDGGLPEEV

SEQ ID NO: 8186 - protein, 9 aa, Homo sapiens
GLDGSLVFL

SEQ ID NO: 8187 - protein, 11 aa, Homo sapiens
GLDIESSLKQL

SEQ ID NO: 8188 - protein, 11 aa, Homo sapiens
GLDISHISQRL

SEQ ID NO: 8189 - protein, 9 aa, Homo sapiens
GLDKSEDKV

SEQ ID NO: 8190 - protein, 8 aa, Homo sapiens
GLDNIILF

SEQ ID NO: 8191 - protein, 9 aa, Homo sapiens
GLDNIILFL

SEQ ID NO: 8192 - protein, 9 aa, Homo sapiens
GLDPARVNV

SEQ ID NO: 8193 - protein, 10 aa, Homo sapiens
GLDPVGRIQM

SEQ ID NO: 8194 - protein, 9 aa, Homo sapiens
GLDSSLVAA

SEQ ID NO: 8195 - protein, 9 aa, Homo sapiens
GLDVPQVSL

SEQ ID NO: 8196 - protein, 9 aa, Homo sapiens
GLDWGMEEV

SEQ ID NO: 8197 - protein, 9 aa, Homo sapiens
GLDWLANQL

SEQ ID NO: 8198 - protein, 9 aa, Homo sapiens
GLEDEMYEV

SEQ ID NO: 8199 - protein, 9 aa, Homo sapiens
GLEEMVEEL

SEQ ID NO: 8200 - protein, 8 aa, Homo sapiens
GLFAPLVF

SEQ ID NO: 8201 - protein, 9 aa, Homo sapiens
GLFAPLVFL

SEQ ID NO: 8202 - protein, 10 aa, Homo sapiens
GLFDEEMNEI

SEQ ID NO: 8203 - protein, 11 aa, Homo sapiens
GLFDPSNVKGL

SEQ ID NO: 8204 - protein, 12 aa, Homo sapiens
GLFDSPPGSDDA

SEQ ID NO: 8205 - protein, 11 aa, Homo sapiens
GLFEDPWLLRV

SEQ ID NO: 8206 - protein, 9 aa, Homo sapiens
GLFEGDEYA

SEQ ID NO: 8207 - protein, 10 aa, Homo sapiens
GLFEGDEYAT

SEQ ID NO: 8208 - protein, 11 aa, Homo sapiens
GLFEGDEYATL

SEQ ID NO: 8209 - protein, 12 aa, Homo sapiens
GLFEGDEYATLM

SEQ ID NO: 8210 - protein, 12 aa, Homo sapiens
GLFEPGDMKYEI

SEQ ID NO: 8211 - protein, 12 aa, Homo sapiens
GLFEPGDMQYEL

SEQ ID NO: 8212 - protein, 12 aa, Homo sapiens
GLFEPGDTKYEI

SEQ ID NO: 8213 - protein, 11 aa, Homo sapiens
GLFEQRVEQYL

SEQ ID NO: 8214 - protein, 12 aa, Homo sapiens
GLFFPGSGGVIT

SEQ ID NO: 8215 - protein, 12 aa, Homo sapiens
GLFGGAGVGKTV

SEQ ID NO: 8216 - protein, 10 aa, Homo sapiens
GLFGKTVPKT

SEQ ID NO: 8217 - protein, 9 aa, Homo sapiens
GLFHFPTPL

SEQ ID NO: 8218 - protein, 11 aa, Homo sapiens
GLFHLGEFVNV

SEQ ID NO: 8219 - protein, 11 aa, Homo sapiens
GLFPNNYVTKI

SEQ ID NO: 8220 - protein, 10 aa, Homo sapiens
GLFQGQNSLL

SEQ ID NO: 8221 - protein, 9 aa, Homo sapiens
GLFTVLYTV

SEQ ID NO: 8222 - protein, 9 aa, Homo sapiens
GLGAFGFQL

SEQ ID NO: 8223 - protein, 9 aa, Homo sapiens
GLGELLRSL

SEQ ID NO: 8224 - protein, 9 aa, Homo sapiens
GLGGFGLEL

SEQ ID NO: 8225 - protein, 10 aa, Homo sapiens
GLGGFGLELA

SEQ ID NO: 8226 - protein, 9 aa, Homo sapiens
GLHEDLNRV

SEQ ID NO: 8227 - protein, 10 aa, Homo sapiens
GLHETQPPSV

SEQ ID NO: 8228 - protein, 11 aa, Homo sapiens
GLHFFNPVPVM

SEQ ID NO: 8229 - protein, 10 aa, Homo sapiens
GLHPQIIIRA

SEQ ID NO: 8230 - protein, 9 aa, Homo sapiens
GLHRYLHLL

SEQ ID NO: 8231 - protein, 9 aa, Homo sapiens
GLHSDSHSL

SEQ ID NO: 8232 - protein, 9 aa, Homo sapiens
GLHSLPPEV

SEQ ID NO: 8233 - protein, 9 aa, Homo sapiens
GLIAGVVSI

SEQ ID NO: 8234 - protein, 11 aa, Homo sapiens
GLIDDGETPEA

SEQ ID NO: 8235 - protein, 9 aa, Homo sapiens
GLIDELNQA

SEQ ID NO: 8236 - protein, 10 aa, Homo sapiens
GLIDELNQAL

SEQ ID NO: 8237 - protein, 12 aa, Homo sapiens
GLIDELNQALKI

SEQ ID NO: 8238 - protein, 11 aa, Homo sapiens
GLIDENPGLQL

SEQ ID NO: 8239 - protein, 9 aa, Homo sapiens
GLIDFAIQL

SEQ ID NO: 8240 - protein, 12 aa, Homo sapiens
GLIDGVVEADLV

SEQ ID NO: 8241 - protein, 11 aa, Homo sapiens
GLIDHQTYLEL

SEQ ID NO: 8242 - protein, 11 aa, Homo sapiens
GLIDWNMFVKL

SEQ ID NO: 8243 - protein, 9 aa, Homo sapiens
GLIDYNQLA

SEQ ID NO: 8244 - protein, 10 aa, Homo sapiens
GLIDYNQLAL

SEQ ID NO: 8245 - protein, 9 aa, Homo sapiens
GLIEDYEAL

SEQ ID NO: 8246 - protein, 11 aa, Homo sapiens
GLIEEDDVILL

SEQ ID NO: 8247 - protein, 9 aa, Homo sapiens
GLIEELVDV

SEQ ID NO: 8248 - protein, 9 aa, Homo sapiens
GLIEIISNA

SEQ ID NO: 8249 - protein, 9 aa, Homo sapiens
GLIEWLENT

SEQ ID NO: 8250 - protein, 10 aa, Homo sapiens
GLIEWLENTV

SEQ ID NO: 8251 - protein, 11 aa, Homo sapiens
GLIGNANMVGL

SEQ ID NO: 8252 - protein, 10 aa, Homo sapiens
GLIGVAFVDM

SEQ ID NO: 8253 - protein, 11 aa, Homo sapiens
GLIGVAFVDML

SEQ ID NO: 8254 - protein, 12 aa, Homo sapiens
GLILGMGGQTAL

SEQ ID NO: 8255 - protein, 9 aa, Homo sapiens
GLISFQEFV

SEQ ID NO: 8256 - protein, 9 aa, Homo sapiens
GLISILEPV

SEQ ID NO: 8257 - protein, 9 aa, Homo sapiens
GLISNSPVL

SEQ ID NO: 8258 - protein, 10 aa, Homo sapiens
GLISVALTKV

SEQ ID NO: 8259 - protein, 11 aa, Homo sapiens
GLISVSNLPKL

SEQ ID NO: 8260 - protein, 12 aa, Homo sapiens
GLITAGAQLVEL

SEQ ID NO: 8261 - protein, 9 aa, Homo sapiens
GLKELSDFL

SEQ ID NO: 8262 - protein, 11 aa, Homo sapiens
GLKEMDNAGQL

SEQ ID NO: 8263 - protein, 12 aa, Homo sapiens
GLKEMDNAGQLV

SEQ ID NO: 8264 - protein, 11 aa, Homo sapiens
GLKENDVIISI

SEQ ID NO: 8265 - protein, 9 aa, Homo sapiens
GLKLTVEEA

SEQ ID NO: 8266 - protein, 11 aa, Homo sapiens
GLKNGVPAVGL

SEQ ID NO: 8267 - protein, 9 aa, Homo sapiens
GLLDFLQGL

SEQ ID NO: 8268 - protein, 10 aa, Homo sapiens
GLLDIYGFEV

SEQ ID NO: 8269 - protein, 11 aa, Homo sapiens
GLLDMNKGLSL

SEQ ID NO: 8270 - protein, 12 aa, Homo sapiens
GLLDNHSSEFNV

SEQ ID NO: 8271 - protein, 9 aa, Homo sapiens
GLLDSILSV

SEQ ID NO: 8272 - protein, 10 aa, Homo sapiens
GLLDTQTSQV

SEQ ID NO: 8273 - protein, 9 aa, Homo sapiens
GLLEELKTV

SEQ ID NO: 8274 - protein, 9 aa, Homo sapiens
GLLEEQYFE

SEQ ID NO: 8275 - protein, 9 aa, Homo sapiens
GLLEGDYEV

SEQ ID NO: 8276 - protein, 10 aa, Homo sapiens
GLLEGTFPNT

SEQ ID NO: 8277 - protein, 9 aa, Homo sapiens
GLLEIVTSV

SEQ ID NO: 8278 - protein, 10 aa, Homo sapiens
GLLELTQVEV

SEQ ID NO: 8279 - protein, 9 aa, Homo sapiens
GLLESVYEM

SEQ ID NO: 8280 - protein, 10 aa, Homo sapiens
GLLETDEATL

SEQ ID NO: 8281 - protein, 12 aa, Homo sapiens
GLLETDEATLDT

SEQ ID NO: 8282 - protein, 12 aa, Homo sapiens
GLLEWESKSDAL

SEQ ID NO: 8283 - protein, 11 aa, Homo sapiens
GLLGDAFLHLI

SEQ ID NO: 8284 - protein, 9 aa, Homo sapiens
GLLGGVIMM

SEQ ID NO: 8285 - protein, 10 aa, Homo sapiens
GLLGGVIMMV

SEQ ID NO: 8286 - protein, 9 aa, Homo sapiens
GLLGGWTVL

SEQ ID NO: 8287 - protein, 10 aa, Homo sapiens
GLLGGWTVLL

SEQ ID NO: 8288 - protein, 11 aa, Homo sapiens
GLLGISKGGEL

SEQ ID NO: 8289 - protein, 9 aa, Homo sapiens
GLLGIYQEL

SEQ ID NO: 8290 - protein, 10 aa, Homo sapiens
GLLGIYQELL

SEQ ID NO: 8291 - protein, 12 aa, Homo sapiens
GLLGLFQGQNSL

SEQ ID NO: 8292 - protein, 9 aa, Homo sapiens
GLLGLQNLL

SEQ ID NO: 8293 - protein, 11 aa, Homo sapiens
GLLGQPEATMV

SEQ ID NO: 8294 - protein, 9 aa, Homo sapiens
GLLHRAFSV

SEQ ID NO: 8295 - protein, 10 aa, Homo sapiens
GLLKLNPVGA

SEQ ID NO: 8296 - protein, 10 aa, Homo sapiens
GLLLVTGPLV

SEQ ID NO: 8297 - protein, 11 aa, Homo sapiens
GLLLVTGPLVL

SEQ ID NO: 8298 - protein, 12 aa, Homo sapiens
GLLPATVQPFHL

SEQ ID NO: 8299 - protein, 11 aa, Homo sapiens
GLLPEELTPLI

SEQ ID NO: 8300 - protein, 12 aa, Homo sapiens
GLLPEELTPLIL

SEQ ID NO: 8301 - protein, 11 aa, Homo sapiens
GLLPPLRIPEL

SEQ ID NO: 8302 - protein, 12 aa, Homo sapiens
GLLPPLRIPELL

SEQ ID NO: 8303 - protein, 9 aa, Homo sapiens
GLLPQLLGV

SEQ ID NO: 8304 - protein, 10 aa, Homo sapiens
GLLPTPNPLT

SEQ ID NO: 8305 - protein, 12 aa, Homo sapiens
GLLPTPNPLTQI

SEQ ID NO: 8306 - protein, 11 aa, Homo sapiens
GLLPVLGQPII

SEQ ID NO: 8307 - protein, 12 aa, Homo sapiens
GLLQGKLALLSV

SEQ ID NO: 8308 - protein, 9 aa, Homo sapiens
GLLRATTAA

SEQ ID NO: 8309 - protein, 12 aa, Homo sapiens
GLLRATTAALLL

SEQ ID NO: 8310 - protein, 10 aa, Homo sapiens
GLLSAEVARL

SEQ ID NO: 8311 - protein, 11 aa, Homo sapiens
GLLSAEVARLL

SEQ ID NO: 8312 - protein, 12 aa, Homo sapiens
GLLSAEVARLLL

SEQ ID NO: 8313 - protein, 12 aa, Homo sapiens
GLLSDPLSDLQL

SEQ ID NO: 8314 - protein, 9 aa, Homo sapiens
GLLSDVVPF

SEQ ID NO: 8315 - protein, 11 aa, Homo sapiens
GLLSDVVPFKV

SEQ ID NO: 8316 - protein, 9 aa, Homo sapiens
GLLSEEVEL

SEQ ID NO: 8317 - protein, 9 aa, Homo sapiens
GLLSPHPLL

SEQ ID NO: 8318 - protein, 11 aa, Homo sapiens
GLLSPHPLLQL

SEQ ID NO: 8319 - protein, 9 aa, Homo sapiens
GLMAEEVQA

SEQ ID NO: 8320 - protein, 10 aa, Homo sapiens
GLMAEEVQAV

SEQ ID NO: 8321 - protein, 12 aa, Homo sapiens
GLMDGKGGGKDV

SEQ ID NO: 8322 - protein, 12 aa, Homo sapiens
GLMDTTLEEVFL

SEQ ID NO: 8323 - protein, 10 aa, Homo sapiens
GLMEEMSALL

SEQ ID NO: 8324 - protein, 11 aa, Homo sapiens
GLMEEMSALLA

SEQ ID NO: 8325 - protein, 12 aa, Homo sapiens
GLMGAGIAQVSV

SEQ ID NO: 8326 - protein, 10 aa, Homo sapiens
GLMLQDLVSA

SEQ ID NO: 8327 - protein, 10 aa, Homo sapiens
GLMPPPEPKV

SEQ ID NO: 8328 - protein, 11 aa, Homo sapiens
GLMTGSGVVGV

SEQ ID NO: 8329 - protein, 8 aa, Homo sapiens
GLMTTVHA

SEQ ID NO: 8330 - protein, 10 aa, Homo sapiens
GLMTTVHAIT

SEQ ID NO: 8331 - protein, 12 aa, Homo sapiens
GLMTTVHAITAT

SEQ ID NO: 8332 - protein, 11 aa, Homo sapiens
GLNEILSDPEV

SEQ ID NO: 8333 - protein, 12 aa, Homo sapiens
GLNEILSDPEVL

SEQ ID NO: 8334 - protein, 11 aa, Homo sapiens
GLNPISTVTEL

SEQ ID NO: 8335 - protein, 10 aa, Homo sapiens
GLNQAATELV

SEQ ID NO: 8336 - protein, 10 aa, Homo sapiens
GLNTLSSFML

SEQ ID NO: 8337 - protein, 9 aa, Homo sapiens
GLPFPFPDI

SEQ ID NO: 8338 - protein, 11 aa, Homo sapiens
GLPPILNALEV

SEQ ID NO: 8339 - protein, 10 aa, Homo sapiens
GLPSGAPPGV

SEQ ID NO: 8340 - protein, 10 aa, Homo sapiens
GLQDVLRTNL

SEQ ID NO: 8341 - protein, 12 aa, Homo sapiens
GLQEAGEEDTRL

SEQ ID NO: 8342 - protein, 10 aa, Homo sapiens
GLQEAINDLV

SEQ ID NO: 8343 - protein, 9 aa, Homo sapiens
GLQEYVEAV

SEQ ID NO: 8344 - protein, 11 aa, Homo sapiens
GLQEYVEAVSF

SEQ ID NO: 8345 - protein, 9 aa, Homo sapiens
GLQFPVGRV

SEQ ID NO: 8346 - protein, 11 aa, Homo sapiens
GLQGALLTHFL

SEQ ID NO: 8347 - protein, 11 aa, Homo sapiens
GLQGGIPNGYL

SEQ ID NO: 8348 - protein, 11 aa, Homo sapiens
GLQGGSAGSPA

SEQ ID NO: 8349 - protein, 9 aa, Homo sapiens
GLQNDLFSL

SEQ ID NO: 8350 - protein, 10 aa, Homo sapiens
GLQNDLFSLA

SEQ ID NO: 8351 - protein, 9 aa, Homo sapiens
GLQQYYVKL

SEQ ID NO: 8352 - protein, 9 aa, Homo sapiens
GLQSQIAQV

SEQ ID NO: 8353 - protein, 10 aa, Homo sapiens
GLQVVEKQNL

SEQ ID NO: 8354 - protein, 9 aa, Homo sapiens
GLREENEGV

SEQ ID NO: 8355 - protein, 11 aa, Homo sapiens
GLRNVQAEEMV

SEQ ID NO: 8356 - protein, 9 aa, Homo sapiens
GLSAAPVPT

SEQ ID NO: 8357 - protein, 8 aa, Homo sapiens
GLSEAQVM

SEQ ID NO: 8358 - protein, 9 aa, Homo sapiens
GLSEAQVMM

SEQ ID NO: 8359 - protein, 10 aa, Homo sapiens
GLSEDTTEET

SEQ ID NO: 8360 - protein, 11 aa, Homo sapiens
GLSEDTTEETL

SEQ ID NO: 8361 - protein, 10 aa, Homo sapiens
GLSEEAIMEL

SEQ ID NO: 8362 - protein, 9 aa, Homo sapiens
GLSESSVKV

SEQ ID NO: 8363 - protein, 10 aa, Homo sapiens
GLSGPPPPNA

SEQ ID NO: 8364 - protein, 10 aa, Homo sapiens
GLSGSGPAYA

SEQ ID NO: 8365 - protein, 11 aa, Homo sapiens
GLSKDDIENMV

SEQ ID NO: 8366 - protein, 9 aa, Homo sapiens
GLSKLSPST

SEQ ID NO: 8367 - protein, 10 aa, Homo sapiens
GLSPATPTPA

SEQ ID NO: 8368 - protein, 9 aa, Homo sapiens
GLSPGMVRA

SEQ ID NO: 8369 - protein, 10 aa, Homo sapiens
GLSPPVAIFF

SEQ ID NO: 8370 - protein, 11 aa, Homo sapiens
GLSPPVAIFFV

SEQ ID NO: 8371 - protein, 9 aa, Homo sapiens
GLSSDLQQV

SEQ ID NO: 8372 - protein, 11 aa, Homo sapiens
GLSSIANLPKL

SEQ ID NO: 8373 - protein, 10 aa, Homo sapiens
GLSSMQGWRV

SEQ ID NO: 8374 - protein, 9 aa, Homo sapiens
GLSVYQIKV

SEQ ID NO: 8375 - protein, 9 aa, Homo sapiens
GLTAEFVNL

SEQ ID NO: 8376 - protein, 9 aa, Homo sapiens
GLTDEFEEL

SEQ ID NO: 8377 - protein, 9 aa, Homo sapiens
GLTDEINFL

SEQ ID NO: 8378 - protein, 9 aa, Homo sapiens
GLTDQINFL

SEQ ID NO: 8379 - protein, 10 aa, Homo sapiens
GLTEAQTREL

SEQ ID NO: 8380 - protein, 8 aa, Homo sapiens
GLTEDMVT

SEQ ID NO: 8381 - protein, 9 aa, Homo sapiens
GLTEDMVTV

SEQ ID NO: 8382 - protein, 9 aa, Homo sapiens
GLTGKPVMV

SEQ ID NO: 8383 - protein, 11 aa, Homo sapiens
GLTSIANLPKL

SEQ ID NO: 8384 - protein, 10 aa, Homo sapiens
GLTSVINQKL

SEQ ID NO: 8385 - protein, 9 aa, Homo sapiens
GLTSVKINV

SEQ ID NO: 8386 - protein, 9 aa, Homo sapiens
GLTTRTIGV

SEQ ID NO: 8387 - protein, 9 aa, Homo sapiens
GLTVSIPGL

SEQ ID NO: 8388 - protein, 11 aa, Homo sapiens
GLVDAEALVAL

SEQ ID NO: 8389 - protein, 9 aa, Homo sapiens
GLVDFVQEV

SEQ ID NO: 8390 - protein, 11 aa, Homo sapiens
GLVDFVQEVNV

SEQ ID NO: 8391 - protein, 9 aa, Homo sapiens
GLVGLEPAT

SEQ ID NO: 8392 - protein, 10 aa, Homo sapiens
GLVGLEPATL

SEQ ID NO: 8393 - protein, 11 aa, Homo sapiens
GLVGPEFHEKL

SEQ ID NO: 8394 - protein, 9 aa, Homo sapiens
GLVGVDQFL

SEQ ID NO: 8395 - protein, 10 aa, Homo sapiens
GLVGVDQFLV

SEQ ID NO: 8396 - protein, 9 aa, Homo sapiens
GLVGVNLTL

SEQ ID NO: 8397 - protein, 9 aa, Homo sapiens
GLVKDSPLL

SEQ ID NO: 8398 - protein, 12 aa, Homo sapiens
GLVKYMNSGPVV

SEQ ID NO: 8399 - protein, 9 aa, Homo sapiens
GLVQGTTPV

SEQ ID NO: 8400 - protein, 9 aa, Homo sapiens
GLVSTGLKV

SEQ ID NO: 8401 - protein, 12 aa, Homo sapiens
GLWDAFSNEEAV

SEQ ID NO: 8402 - protein, 11 aa, Homo sapiens
GLWEIDNNPKV

SEQ ID NO: 8403 - protein, 10 aa, Homo sapiens
GLWEIENNPT

SEQ ID NO: 8404 - protein, 11 aa, Homo sapiens
GLWEIQNNPHA

SEQ ID NO: 8405 - protein, 9 aa, Homo sapiens
GLWFHPEEL

SEQ ID NO: 8406 - protein, 8 aa, Homo sapiens
GLWGHALL

SEQ ID NO: 8407 - protein, 9 aa, Homo sapiens
GLWGHPVLA

SEQ ID NO: 8408 - protein, 12 aa, Homo sapiens
GLWGPEEEPHLL

SEQ ID NO: 8409 - protein, 11 aa, Homo sapiens
GLWLVAQQPAL

SEQ ID NO: 8410 - protein, 11 aa, Homo sapiens
GLWPGAGTIRL

SEQ ID NO: 8411 - protein, 10 aa, Homo sapiens
GLYADYLFNA

SEQ ID NO: 8412 - protein, 10 aa, Homo sapiens
GLYALGLIHA

SEQ ID NO: 8413 - protein, 11 aa, Homo sapiens
GLYDVVSVLRI

SEQ ID NO: 8414 - protein, 10 aa, Homo sapiens
GLYEGLDWLS

SEQ ID NO: 8415 - protein, 9 aa, Homo sapiens
GLYGIKDDV

SEQ ID NO: 8416 - protein, 12 aa, Homo sapiens
GLYGIKDDVFLS

SEQ ID NO: 8417 - protein, 9 aa, Homo sapiens
GLYGLIVAL

SEQ ID NO: 8418 - protein, 9 aa, Homo sapiens
GLYGSHLYV

SEQ ID NO: 8419 - protein, 10 aa, Homo sapiens
GLYSKTMTPT

SEQ ID NO: 8420 - protein, 9 aa, Homo sapiens
GLYSRQLYV

SEQ ID NO: 8421 - protein, 11 aa, Homo sapiens
GMADYSDPSYV

SEQ ID NO: 8422 - protein, 9 aa, Homo sapiens
GMAFRVPTA

SEQ ID NO: 8423 - protein, 9 aa, Homo sapiens
GMAFTFLKV

SEQ ID NO: 8424 - protein, 12 aa, Homo sapiens
GMDELSEEDKLT

SEQ ID NO: 8425 - protein, 8 aa, Homo sapiens
GMDYDYAL

SEQ ID NO: 8426 - protein, 9 aa, Homo sapiens
GMDYDYALL

SEQ ID NO: 8427 - protein, 11 aa, Homo sapiens
GMESMSNVPYV

SEQ ID NO: 8428 - protein, 9 aa, Homo sapiens
GMFGKETYV

SEQ ID NO: 8429 - protein, 10 aa, Homo sapiens
GMGGITAVTV

SEQ ID NO: 8430 - protein, 9 aa, Homo sapiens
GMIDEEFTV

SEQ ID NO: 8431 - protein, 11 aa, Homo sapiens
GMLPANYVEAI

SEQ ID NO: 8432 - protein, 9 aa, Homo sapiens
GMMSTVTEV

SEQ ID NO: 8433 - protein, 9 aa, Homo sapiens
GMNDMNHEV

SEQ ID NO: 8434 - protein, 10 aa, Homo sapiens
GMNQFKPIFL

SEQ ID NO: 8435 - protein, 10 aa, Homo sapiens
GMVPFVFVGT

SEQ ID NO: 8436 - protein, 9 aa, Homo sapiens
GMWGSSVFL

SEQ ID NO: 8437 - protein, 9 aa, Homo sapiens
GMYGIENEV

SEQ ID NO: 8438 - protein, 10 aa, Homo sapiens
GMYGIENEVF

SEQ ID NO: 8439 - protein, 11 aa, Homo sapiens
GMYGIENEVFL

SEQ ID NO: 8440 - protein, 10 aa, Homo sapiens
GMYSLPFLTA

SEQ ID NO: 8441 - protein, 9 aa, Homo sapiens
GQAPSVFSV

SEQ ID NO: 8442 - protein, 11 aa, Homo sapiens
GQDEMIDVIGV

SEQ ID NO: 8443 - protein, 9 aa, Homo sapiens
GQDEPLIHV

SEQ ID NO: 8444 - protein, 9 aa, Homo sapiens
GQEESQVSV

SEQ ID NO: 8445 - protein, 10 aa, Homo sapiens
GQFQGRPVSV

SEQ ID NO: 8446 - protein, 9 aa, Homo sapiens
GQHKDAYQV

SEQ ID NO: 8447 - protein, 9 aa, Homo sapiens
GQICRVTTV

SEQ ID NO: 8448 - protein, 11 aa, Homo sapiens
GQISGLNVLRV

SEQ ID NO: 8449 - protein, 9 aa, Homo sapiens
GQLAEVHSV

SEQ ID NO: 8450 - protein, 9 aa, Homo sapiens
GQLEFRALL

SEQ ID NO: 8451 - protein, 9 aa, Homo sapiens
GQLEILEFL

SEQ ID NO: 8452 - protein, 9 aa, Homo sapiens
GQLNGFHEA

SEQ ID NO: 8453 - protein, 11 aa, Homo sapiens
GQNGISDLVKV

SEQ ID NO: 8454 - protein, 9 aa, Homo sapiens
GQNPTNAEV

SEQ ID NO: 8455 - protein, 11 aa, Homo sapiens
GQPAEEIFESV

SEQ ID NO: 8456 - protein, 10 aa, Homo sapiens
GQPAQPAPMV

SEQ ID NO: 8457 - protein, 10 aa, Homo sapiens
GQQELADLFV

SEQ ID NO: 8458 - protein, 9 aa, Homo sapiens
GQSEEEASI

SEQ ID NO: 8459 - protein, 12 aa, Homo sapiens
GQVEVTGDEYNV

SEQ ID NO: 8460 - protein, 9 aa, Homo sapiens
GQWASVIRV

SEQ ID NO: 8461 - protein, 12 aa, Homo sapiens
GQWDPADPAPSA

SEQ ID NO: 8462 - protein, 10 aa, Homo sapiens
GQYEGKVSSV

SEQ ID NO: 8463 - protein, 10 aa, Homo sapiens
GQYGLDVVQA

SEQ ID NO: 8464 - protein, 10 aa, Homo sapiens
GTAENGIHPL

SEQ ID NO: 8465 - protein, 10 aa, Homo sapiens
GTFDISILEI

SEQ ID NO: 8466 - protein, 9 aa, Homo sapiens
GTFDVSILT

SEQ ID NO: 8467 - protein, 10 aa, Homo sapiens
GTFEWVDSML

SEQ ID NO: 8468 - protein, 10 aa, Homo sapiens
GTMDGANVEM

SEQ ID NO: 8469 - protein, 12 aa, Homo sapiens
GVAELLFNTIQA

SEQ ID NO: 8470 - protein, 11 aa, Homo sapiens
GVAGLAGLIGL

SEQ ID NO: 8471 - protein, 11 aa, Homo sapiens
GVALSNVIHKV

SEQ ID NO: 8472 - protein, 9 aa, Homo sapiens
GVDEEPQHV

SEQ ID NO: 8473 - protein, 9 aa, Homo sapiens
GVDSLITLA

SEQ ID NO: 8474 - protein, 9 aa, Homo sapiens
GVDVTLPRV

SEQ ID NO: 8475 - protein, 9 aa, Homo sapiens
GVFEWEAFA

SEQ ID NO: 8476 - protein, 9 aa, Homo sapiens
GVGAVNISV

SEQ ID NO: 8477 - protein, 9 aa, Homo sapiens
GVIAGLNVL

SEQ ID NO: 8478 - protein, 10 aa, Homo sapiens
GVLAGDVTDV

SEQ ID NO: 8479 - protein, 12 aa, Homo sapiens
GVLAGDVTDVLL

SEQ ID NO: 8480 - protein, 11 aa, Homo sapiens
GVLDEQELEAL

SEQ ID NO: 8481 - protein, 9 aa, Homo sapiens
GVLDFLEEV

SEQ ID NO: 8482 - protein, 10 aa, Homo sapiens
GVLDGVLMEL

SEQ ID NO: 8483 - protein, 9 aa, Homo sapiens
GVLENIFGV

SEQ ID NO: 8484 - protein, 10 aa, Homo sapiens
GVLGLDLWQV

SEQ ID NO: 8485 - protein, 10 aa, Homo sapiens
GVLGNALEGV

SEQ ID NO: 8486 - protein, 11 aa, Homo sapiens
GVLQDKDLFSV

SEQ ID NO: 8487 - protein, 9 aa, Homo sapiens
GVMDGVPSA

SEQ ID NO: 8488 - protein, 9 aa, Homo sapiens
GVMEYDLSL

SEQ ID NO: 8489 - protein, 9 aa, Homo sapiens
GVMLAVDAV

SEQ ID NO: 8490 - protein, 9 aa, Homo sapiens
GVMPEIAQA

SEQ ID NO: 8491 - protein, 9 aa, Homo sapiens
GVMSGAVPA

SEQ ID NO: 8492 - protein, 10 aa, Homo sapiens
GVMSGAVPAA

SEQ ID NO: 8493 - protein, 9 aa, Homo sapiens
GVNTVTTLV

SEQ ID NO: 8494 - protein, 9 aa, Homo sapiens
GVQGFEALL

SEQ ID NO: 8495 - protein, 9 aa, Homo sapiens
GVTEVVVKL

SEQ ID NO: 8496 - protein, 9 aa, Homo sapiens
GVVEVTHDL

SEQ ID NO: 8497 - protein, 9 aa, Homo sapiens
GVYGDVQRV

SEQ ID NO: 8498 - protein, 12 aa, Homo sapiens
GVYGGDEVGALV

SEQ ID NO: 8499 - protein, 11 aa, Homo sapiens
HIADLAGNSEV

SEQ ID NO: 8500 - protein, 9 aa, Homo sapiens
HIAEVSQEV

SEQ ID NO: 8501 - protein, 9 aa, Homo sapiens
HIMEHLEGV

SEQ ID NO: 8502 - protein, 11 aa, Homo sapiens
HIMPGVGLPEL

SEQ ID NO: 8503 - protein, 9 aa, Homo sapiens
HINKTIAPA

SEQ ID NO: 8504 - protein, 10 aa, Homo sapiens
HISGQHLVAV

SEQ ID NO: 8505 - protein, 11 aa, Homo sapiens
HLAETLSSWEA

SEQ ID NO: 8506 - protein, 10 aa, Homo sapiens
HLAGLGLTEA

SEQ ID NO: 8507 - protein, 9 aa, Homo sapiens
HLAHEVSLA

SEQ ID NO: 8508 - protein, 9 aa, Homo sapiens
HLAKVTAEV

SEQ ID NO: 8509 - protein, 9 aa, Homo sapiens
HLAMNFHEV

SEQ ID NO: 8510 - protein, 11 aa, Homo sapiens
HLAMNFHEVLA

SEQ ID NO: 8511 - protein, 9 aa, Homo sapiens
HLDKISDSV

SEQ ID NO: 8512 - protein, 9 aa, Homo sapiens
HLDKSDPKV

SEQ ID NO: 8513 - protein, 9 aa, Homo sapiens
HLDPSLTHT

SEQ ID NO: 8514 - protein, 9 aa, Homo sapiens
HLDSSGSYV

SEQ ID NO: 8515 - protein, 12 aa, Homo sapiens
HLFDGLDDDEPS

SEQ ID NO: 8516 - protein, 11 aa, Homo sapiens
HLGGEDFDNRL

SEQ ID NO: 8517 - protein, 11 aa, Homo sapiens
HLGGEDFDQRV

SEQ ID NO: 8518 - protein, 8 aa, Homo sapiens
HLGKPPEV

SEQ ID NO: 8519 - protein, 11 aa, Homo sapiens
HLIHEVTKVLL

SEQ ID NO: 8520 - protein, 10 aa, Homo sapiens
HLLDFPNIVI

SEQ ID NO: 8521 - protein, 10 aa, Homo sapiens
HLLDPTVEYV

SEQ ID NO: 8522 - protein, 9 aa, Homo sapiens
HLLGHLEQA

SEQ ID NO: 8523 - protein, 10 aa, Homo sapiens
HLLLEAVPAV

SEQ ID NO: 8524 - protein, 12 aa, Homo sapiens
HLLPSGIINPNV

SEQ ID NO: 8525 - protein, 11 aa, Homo sapiens
HLLSLMGIPYL

SEQ ID NO: 8526 - protein, 9 aa, Homo sapiens
HLNCTISQV

SEQ ID NO: 8527 - protein, 9 aa, Homo sapiens
HLPGFVEQA

SEQ ID NO: 8528 - protein, 11 aa, Homo sapiens
HLQDLMEGLTA

SEQ ID NO: 8529 - protein, 10 aa, Homo sapiens
HLQEGFGCVV

SEQ ID NO: 8530 - protein, 9 aa, Homo sapiens
HLSNIPPSV

SEQ ID NO: 8531 - protein, 9 aa, Homo sapiens
HLTDTSHGV

SEQ ID NO: 8532 - protein, 9 aa, Homo sapiens
HLTWEPPSV

SEQ ID NO: 8533 - protein, 11 aa, Homo sapiens
HLVDPIDDLFL

SEQ ID NO: 8534 - protein, 9 aa, Homo sapiens
HLWAELVFL

SEQ ID NO: 8535 - protein, 12 aa, Homo sapiens
HLYDVFGDPAYL

SEQ ID NO: 8536 - protein, 9 aa, Homo sapiens
HLYPNTPYA

SEQ ID NO: 8537 - protein, 9 aa, Homo sapiens
HLYRGIFPV

SEQ ID NO: 8538 - protein, 9 aa, Homo sapiens
HVDGFIANV

SEQ ID NO: 8539 - protein, 10 aa, Homo sapiens
IIAEDVDGEA

SEQ ID NO: 8540 - protein, 9 aa, Homo sapiens
IIAEGIPEA

SEQ ID NO: 8541 - protein, 10 aa, Homo sapiens
IIAEGIPEAL

SEQ ID NO: 8542 - protein, 10 aa, Homo sapiens
IIDPGSTVTV

SEQ ID NO: 8543 - protein, 9 aa, Homo sapiens
IIHDFQPHV

SEQ ID NO: 8544 - protein, 11 aa, Homo sapiens
IILGGVKAVTL

SEQ ID NO: 8545 - protein, 9 aa, Homo sapiens
IIMDDEFQL

SEQ ID NO: 8546 - protein, 10 aa, Homo sapiens
IISELRNQYV

SEQ ID NO: 8547 - protein, 9 aa, Homo sapiens
IISKFLPPV

SEQ ID NO: 8548 - protein, 10 aa, Homo sapiens
IIYGGSVTGA

SEQ ID NO: 8549 - protein, 11 aa, Homo sapiens
ILAAHVPTLQV

SEQ ID NO: 8550 - protein, 12 aa, Homo sapiens
ILAAHVPTLQVL

SEQ ID NO: 8551 - protein, 9 aa, Homo sapiens
ILADLNLSV

SEQ ID NO: 8552 - protein, 10 aa, Homo sapiens
ILADVLKVEV

SEQ ID NO: 8553 - protein, 11 aa, Homo sapiens
ILADWNEDIEA

SEQ ID NO: 8554 - protein, 9 aa, Homo sapiens
ILAGEIYVM

SEQ ID NO: 8555 - protein, 9 aa, Homo sapiens
ILAGEMLSV

SEQ ID NO: 8556 - protein, 12 aa, Homo sapiens
ILAGSFETAMRL

SEQ ID NO: 8557 - protein, 9 aa, Homo sapiens
ILASFISGL

SEQ ID NO: 8558 - protein, 9 aa, Homo sapiens
ILASVILNV

SEQ ID NO: 8559 - protein, 9 aa, Homo sapiens
ILDAAGANL

SEQ ID NO: 8560 - protein, 9 aa, Homo sapiens
ILDDQTNKL

SEQ ID NO: 8561 - protein, 12 aa, Homo sapiens
ILDEEPIVNRGL

SEQ ID NO: 8562 - protein, 9 aa, Homo sapiens
ILDEIGADV

SEQ ID NO: 8563 - protein, 11 aa, Homo sapiens
ILDEIGADVQA

SEQ ID NO: 8564 - protein, 9 aa, Homo sapiens
ILDELAEKL

SEQ ID NO: 8565 - protein, 11 aa, Homo sapiens
ILDEPTNHLDM

SEQ ID NO: 8566 - protein, 9 aa, Homo sapiens
ILDETLENV

SEQ ID NO: 8567 - protein, 9 aa, Homo sapiens
ILDETVNSV

SEQ ID NO: 8568 - protein, 9 aa, Homo sapiens
ILDKFTEEV

SEQ ID NO: 8569 - protein, 9 aa, Homo sapiens
ILDKYPLAV

SEQ ID NO: 8570 - protein, 9 aa, Homo sapiens
ILDLIQVFV

SEQ ID NO: 8571 - protein, 10 aa, Homo sapiens
ILDMFTEIKV

SEQ ID NO: 8572 - protein, 9 aa, Homo sapiens
ILDMSPFTV

SEQ ID NO: 8573 - protein, 10 aa, Homo sapiens
ILDSGKIVQI

SEQ ID NO: 8574 - protein, 9 aa, Homo sapiens
ILDSIIAQV

SEQ ID NO: 8575 - protein, 9 aa, Homo sapiens
ILDVASLEV

SEQ ID NO: 8576 - protein, 10 aa, Homo sapiens
ILDVLTGINV

SEQ ID NO: 8577 - protein, 8 aa, Homo sapiens
ILEDIQVT

SEQ ID NO: 8578 - protein, 9 aa, Homo sapiens
ILEDIQVTL

SEQ ID NO: 8579 - protein, 11 aa, Homo sapiens
ILEESENLHNA

SEQ ID NO: 8580 - protein, 11 aa, Homo sapiens
ILENKEGLELL

SEQ ID NO: 8581 - protein, 9 aa, Homo sapiens
ILENWNMFV

SEQ ID NO: 8582 - protein, 9 aa, Homo sapiens
ILFDFMDSV

SEQ ID NO: 8583 - protein, 12 aa, Homo sapiens
ILFEQDNEEQSV

SEQ ID NO: 8584 - protein, 9 aa, Homo sapiens
ILFESQFSV

SEQ ID NO: 8585 - protein, 9 aa, Homo sapiens
ILFGMGNPL

SEQ ID NO: 8586 - protein, 10 aa, Homo sapiens
ILFGMGNPLL

SEQ ID NO: 8587 - protein, 12 aa, Homo sapiens
ILFGVYGDVQRV

SEQ ID NO: 8588 - protein, 10 aa, Homo sapiens
ILFLGDGLGV

SEQ ID NO: 8589 - protein, 12 aa, Homo sapiens
ILFLGDGLGVPT

SEQ ID NO: 8590 - protein, 10 aa, Homo sapiens
ILFPGGSVDL

SEQ ID NO: 8591 - protein, 11 aa, Homo sapiens
ILFPPPPPPNI

SEQ ID NO: 8592 - protein, 9 aa, Homo sapiens
ILGATEVKL

SEQ ID NO: 8593 - protein, 9 aa, Homo sapiens
ILGGMIVRI

SEQ ID NO: 8594 - protein, 9 aa, Homo sapiens
ILGGQPPNV

SEQ ID NO: 8595 - protein, 9 aa, Homo sapiens
ILGGSVLHL

SEQ ID NO: 8596 - protein, 8 aa, Homo sapiens
ILGITSPA

SEQ ID NO: 8597 - protein, 9 aa, Homo sapiens
ILGLPQPLL

SEQ ID NO: 8598 - protein, 9 aa, Homo sapiens
ILGNWNMFV

SEQ ID NO: 8599 - protein, 10 aa, Homo sapiens
ILGSFQNIKM

SEQ ID NO: 8600 - protein, 8 aa, Homo sapiens
ILGTAQSV

SEQ ID NO: 8601 - protein, 10 aa, Homo sapiens
ILGYTEHQVV

SEQ ID NO: 8602 - protein, 10 aa, Homo sapiens
ILHDINSDGV

SEQ ID NO: 8603 - protein, 9 aa, Homo sapiens
ILHEHHIFL

SEQ ID NO: 8604 - protein, 9 aa, Homo sapiens
ILHHHIASV

SEQ ID NO: 8605 - protein, 12 aa, Homo sapiens
ILIAGGPGNPAL

SEQ ID NO: 8606 - protein, 12 aa, Homo sapiens
ILIDQGKDDQFL

SEQ ID NO: 8607 - protein, 9 aa, Homo sapiens
ILIDWLVQV

SEQ ID NO: 8608 - protein, 9 aa, Homo sapiens
ILKDGIHNV

SEQ ID NO: 8609 - protein, 9 aa, Homo sapiens
ILLDIHIFM

SEQ ID NO: 8610 - protein, 11 aa, Homo sapiens
ILLDPGALPAL

SEQ ID NO: 8611 - protein, 11 aa, Homo sapiens
ILLELEAPLKI

SEQ ID NO: 8612 - protein, 10 aa, Homo sapiens
ILLENLRFHV

SEQ ID NO: 8613 - protein, 9 aa, Homo sapiens
ILLGATCGL

SEQ ID NO: 8614 - protein, 10 aa, Homo sapiens
ILLGLMGLQV

SEQ ID NO: 8615 - protein, 10 aa, Homo sapiens
ILLNGNNITM

SEQ ID NO: 8616 - protein, 9 aa, Homo sapiens
ILLSQTTGV

SEQ ID NO: 8617 - protein, 10 aa, Homo sapiens
ILLTDGDPTV

SEQ ID NO: 8618 - protein, 8 aa, Homo sapiens
ILLYETAL

SEQ ID NO: 8619 - protein, 9 aa, Homo sapiens
ILLYETALL

SEQ ID NO: 8620 - protein, 11 aa, Homo sapiens
ILMDKPEMNVV

SEQ ID NO: 8621 - protein, 12 aa, Homo sapiens
ILMDKPEMNVVL

SEQ ID NO: 8622 - protein, 9 aa, Homo sapiens
ILMEFLLNV

SEQ ID NO: 8623 - protein, 10 aa, Homo sapiens
ILMGGTVDTV

SEQ ID NO: 8624 - protein, 10 aa, Homo sapiens
ILMGTELTQV

SEQ ID NO: 8625 - protein, 9 aa, Homo sapiens
ILNKLTPQM

SEQ ID NO: 8626 - protein, 11 aa, Homo sapiens
ILNPEEIEKYV

SEQ ID NO: 8627 - protein, 9 aa, Homo sapiens
ILNPHVHLV

SEQ ID NO: 8628 - protein, 11 aa, Homo sapiens
ILNPIANEIYL

SEQ ID NO: 8629 - protein, 10 aa, Homo sapiens
ILNVDGLIGV

SEQ ID NO: 8630 - protein, 9 aa, Homo sapiens
ILPLPGQSV

SEQ ID NO: 8631 - protein, 12 aa, Homo sapiens
ILQDFTGVPAVV

SEQ ID NO: 8632 - protein, 10 aa, Homo sapiens
ILQDGGLQVV

SEQ ID NO: 8633 - protein, 9 aa, Homo sapiens
ILQEAQNLM

SEQ ID NO: 8634 - protein, 9 aa, Homo sapiens
ILQFNLLGV

SEQ ID NO: 8635 - protein, 9 aa, Homo sapiens
ILSELAPSL

SEQ ID NO: 8636 - protein, 10 aa, Homo sapiens
ILSESVVPDV

SEQ ID NO: 8637 - protein, 11 aa, Homo sapiens
ILSGFGGILGL

SEQ ID NO: 8638 - protein, 9 aa, Homo sapiens
ILSHMTHEV

SEQ ID NO: 8639 - protein, 11 aa, Homo sapiens
ILSKYFDLIYV

SEQ ID NO: 8640 - protein, 9 aa, Homo sapiens
ILSPLSVAL

SEQ ID NO: 8641 - protein, 9 aa, Homo sapiens
ILSPTVVSI

SEQ ID NO: 8642 - protein, 8 aa, Homo sapiens
ILSPVQEV

SEQ ID NO: 8643 - protein, 9 aa, Homo sapiens
ILSPWGAEV

SEQ ID NO: 8644 - protein, 9 aa, Homo sapiens
ILTAIIQGM

SEQ ID NO: 8645 - protein, 10 aa, Homo sapiens
ILTDITGHNV

SEQ ID NO: 8646 - protein, 12 aa, Homo sapiens
ILTDITKGVQYL

SEQ ID NO: 8647 - protein, 11 aa, Homo sapiens
ILTDMSRPVEL

SEQ ID NO: 8648 - protein, 11 aa, Homo sapiens
ILTIDDGIFEV

SEQ ID NO: 8649 - protein, 11 aa, Homo sapiens
ILTIEDGIFEV

SEQ ID NO: 8650 - protein, 9 aa, Homo sapiens
ILTMANPII

SEQ ID NO: 8651 - protein, 12 aa, Homo sapiens
ILVDLEPGTMDS

SEQ ID NO: 8652 - protein, 10 aa, Homo sapiens
ILVGDVGQTV

SEQ ID NO: 8653 - protein, 10 aa, Homo sapiens
ILVSDGDPTV

SEQ ID NO: 8654 - protein, 9 aa, Homo sapiens
ILVTLLHTL

SEQ ID NO: 8655 - protein, 11 aa, Homo sapiens
ILWAPDEESGV

SEQ ID NO: 8656 - protein, 12 aa, Homo sapiens
ILWDMSLGKPAA

SEQ ID NO: 8657 - protein, 8 aa, Homo sapiens
ILWPVEIT

SEQ ID NO: 8658 - protein, 9 aa, Homo sapiens
ILWPVEITL

SEQ ID NO: 8659 - protein, 9 aa, Homo sapiens
ILWYFEHQL

SEQ ID NO: 8660 - protein, 11 aa, Homo sapiens
ILYDERSVHKV

SEQ ID NO: 8661 - protein, 10 aa, Homo sapiens
ILYDWINPTY

SEQ ID NO: 8662 - protein, 11 aa, Homo sapiens
ILYDWINPTYL

SEQ ID NO: 8663 - protein, 11 aa, Homo sapiens
ILYGNGPGYKV

SEQ ID NO: 8664 - protein, 12 aa, Homo sapiens
ILYGNGPGYKVV

SEQ ID NO: 8665 - protein, 8 aa, Homo sapiens
ILYRPVAV

SEQ ID NO: 8666 - protein, 12 aa, Homo sapiens
ILYTIDTENSTV

SEQ ID NO: 8667 - protein, 11 aa, Homo sapiens
IMFDGPEAWGV

SEQ ID NO: 8668 - protein, 9 aa, Homo sapiens
IMFDVTSRV

SEQ ID NO: 8669 - protein, 11 aa, Homo sapiens
IMFETFNTPAM

SEQ ID NO: 8670 - protein, 9 aa, Homo sapiens
IMGEAMERV

SEQ ID NO: 8671 - protein, 10 aa, Homo sapiens
IMIDPVLGTV

SEQ ID NO: 8672 - protein, 12 aa, Homo sapiens
IMIDPVLGTVGF

SEQ ID NO: 8673 - protein, 11 aa, Homo sapiens
IMLSEKHLVSV

SEQ ID NO: 8674 - protein, 10 aa, Homo sapiens
IMLTDGDANV

SEQ ID NO: 8675 - protein, 9 aa, Homo sapiens
ITQETLEAL

SEQ ID NO: 8676 - protein, 9 aa, Homo sapiens
IVAPGTFEV

SEQ ID NO: 8677 - protein, 9 aa, Homo sapiens
IVATKPLYV

SEQ ID NO: 8678 - protein, 8 aa, Homo sapiens
IVDPFQIL

SEQ ID NO: 8679 - protein, 9 aa, Homo sapiens
IVDPFQILV

SEQ ID NO: 8680 - protein, 11 aa, Homo sapiens
IVDPNVDEHSV

SEQ ID NO: 8681 - protein, 10 aa, Homo sapiens
IVDPVQPQKV

SEQ ID NO: 8682 - protein, 9 aa, Toxoplasma gondii ME49
IVEGLMTTV

SEQ ID NO: 8683 - protein, 9 aa, Homo sapiens
IVWNGPVGV

SEQ ID NO: 8684 - protein, 11 aa, Homo sapiens
KIFGVTTLDIV

SEQ ID NO: 8685 - protein, 9 aa, Homo sapiens
KIKGDVPSV

SEQ ID NO: 8686 - protein, 9 aa, Homo sapiens
KIMHFPTWV

SEQ ID NO: 8687 - protein, 9 aa, Homo sapiens
KIMQSSSEV

SEQ ID NO: 8688 - protein, 11 aa, Homo sapiens
KISSIQSIVPA

SEQ ID NO: 8689 - protein, 9 aa, Homo sapiens
KITNLTQQL

SEQ ID NO: 8690 - protein, 9 aa, Homo sapiens
KIWDSYFYL

SEQ ID NO: 8691 - protein, 11 aa, Homo sapiens
KIYVDDGLISL

SEQ ID NO: 8692 - protein, 11 aa, Homo sapiens
KLAAIIPDPVV

SEQ ID NO: 8693 - protein, 12 aa, Homo sapiens
KLAALNPESNTA

SEQ ID NO: 8694 - protein, 11 aa, Homo sapiens
KLAEQFPRQVL

SEQ ID NO: 8695 - protein, 9 aa, Homo sapiens
KLAESKVSV

SEQ ID NO: 8696 - protein, 9 aa, Homo sapiens
KLAETTDKV

SEQ ID NO: 8697 - protein, 11 aa, Homo sapiens
KLAQANGWGVM

SEQ ID NO: 8698 - protein, 12 aa, Homo sapiens
KLAQANGWGVMV

SEQ ID NO: 8699 - protein, 10 aa, Homo sapiens
KLAQENGWGV

SEQ ID NO: 8700 - protein, 10 aa, Homo sapiens
KLAQSNGWGV

SEQ ID NO: 8701 - protein, 11 aa, Homo sapiens
KLASVPAGGAV

SEQ ID NO: 8702 - protein, 9 aa, Homo sapiens
KLDADMPEV

SEQ ID NO: 8703 - protein, 11 aa, Homo sapiens
KLDDQSEDEAL

SEQ ID NO: 8704 - protein, 9 aa, Homo sapiens
KLDEAFEFV

SEQ ID NO: 8705 - protein, 8 aa, Homo sapiens
KLDEDYLY

SEQ ID NO: 8706 - protein, 9 aa, Homo sapiens
KLDEDYLYM

SEQ ID NO: 8707 - protein, 10 aa, Homo sapiens
KLDELKRQEV

SEQ ID NO: 8708 - protein, 9 aa, Homo sapiens
KLDENSAFL

SEQ ID NO: 8709 - protein, 9 aa, Homo sapiens
KLDESIYDV

SEQ ID NO: 8710 - protein, 9 aa, Homo sapiens
KLDETGNSL

SEQ ID NO: 8711 - protein, 9 aa, Homo sapiens
KLDIGQYLL

SEQ ID NO: 8712 - protein, 9 aa, Homo sapiens
KLDPHNHVL

SEQ ID NO: 8713 - protein, 11 aa, Homo sapiens
KLDYDEDASAM

SEQ ID NO: 8714 - protein, 12 aa, Homo sapiens
KLDYDEDASAML

SEQ ID NO: 8715 - protein, 9 aa, Homo sapiens
KLDYGQHVV

SEQ ID NO: 8716 - protein, 10 aa, Homo sapiens
KLEEEGEQFV

SEQ ID NO: 8717 - protein, 11 aa, Homo sapiens
KLEGDLTGPSV

SEQ ID NO: 8718 - protein, 9 aa, Homo sapiens
KLFAGINSV

SEQ ID NO: 8719 - protein, 9 aa, Homo sapiens
KLFANIAEV

SEQ ID NO: 8720 - protein, 10 aa, Homo sapiens
KLFDSDPITV

SEQ ID NO: 8721 - protein, 12 aa, Homo sapiens
KLFDSDPITVTV

SEQ ID NO: 8722 - protein, 9 aa, Homo sapiens
KLFSILSTV

SEQ ID NO: 8723 - protein, 10 aa, Homo sapiens
KLFYADHPFI

SEQ ID NO: 8724 - protein, 11 aa, Homo sapiens
KLFYADHPFIF

SEQ ID NO: 8725 - protein, 12 aa, Homo sapiens
KLFYADHPFIFL

SEQ ID NO: 8726 - protein, 12 aa, Homo sapiens
KLGEIVTTIPTI

SEQ ID NO: 8727 - protein, 9 aa, Homo sapiens
KLGPAPKTL

SEQ ID NO: 8728 - protein, 9 aa, Homo sapiens
KLGPDDPNV

SEQ ID NO: 8729 - protein, 9 aa, Homo sapiens
KLGSYEHRI

SEQ ID NO: 8730 - protein, 11 aa, Homo sapiens
KLHVDPENFRL

SEQ ID NO: 8731 - protein, 10 aa, Homo sapiens
KLIAGKIIPA

SEQ ID NO: 8732 - protein, 9 aa, Homo sapiens
KLIFPYVEL

SEQ ID NO: 8733 - protein, 10 aa, Homo sapiens
KLIPGPLSPV

SEQ ID NO: 8734 - protein, 11 aa, Homo sapiens
KLIPGPLSPVA

SEQ ID NO: 8735 - protein, 9 aa, Homo sapiens
KLIPLIFEV

SEQ ID NO: 8736 - protein, 11 aa, Homo sapiens
KLKEAVKEESI

SEQ ID NO: 8737 - protein, 11 aa, Homo sapiens
KLLCGLLAERL

SEQ ID NO: 8738 - protein, 9 aa, Homo sapiens
KLLDGPPGV

SEQ ID NO: 8739 - protein, 11 aa, Homo sapiens
KLLDGPPGVDV

SEQ ID NO: 8740 - protein, 9 aa, Homo sapiens
KLLDILSYL

SEQ ID NO: 8741 - protein, 11 aa, Homo sapiens
KLLDMVGKVQI

SEQ ID NO: 8742 - protein, 10 aa, Homo sapiens
KLLEEATISV

SEQ ID NO: 8743 - protein, 12 aa, Homo sapiens
KLLEEDGTIITL

SEQ ID NO: 8744 - protein, 9 aa, Homo sapiens
KLLEKLYKV

SEQ ID NO: 8745 - protein, 9 aa, Homo sapiens
KLLETKWTL

SEQ ID NO: 8746 - protein, 9 aa, Homo sapiens
KLLGKLPEL

SEQ ID NO: 8747 - protein, 11 aa, Homo sapiens
KLLGQFTLIGI

SEQ ID NO: 8748 - protein, 10 aa, Homo sapiens
KLLPGDIHQI

SEQ ID NO: 8749 - protein, 10 aa, Homo sapiens
KLLQEEVTKV

SEQ ID NO: 8750 - protein, 12 aa, Homo sapiens
KLLTEKDAQIAM

SEQ ID NO: 8751 - protein, 9 aa, Homo sapiens
KLMPGTYTL

SEQ ID NO: 8752 - protein, 11 aa, Homo sapiens
KLMQITSLHSL

SEQ ID NO: 8753 - protein, 11 aa, Homo sapiens
KLNDMEPSKAV

SEQ ID NO: 8754 - protein, 9 aa, Homo sapiens
KLNEINEKI

SEQ ID NO: 8755 - protein, 9 aa, Homo sapiens
KLNENYEEV

SEQ ID NO: 8756 - protein, 9 aa, Homo sapiens
KLNEVIRQV

SEQ ID NO: 8757 - protein, 9 aa, Homo sapiens
KLNNVNNQL

SEQ ID NO: 8758 - protein, 12 aa, Homo sapiens
KLPGAFILGAGA

SEQ ID NO: 8759 - protein, 9 aa, Homo sapiens
KLPPQSSGV

SEQ ID NO: 8760 - protein, 9 aa, Homo sapiens
KLQDFKSFL

SEQ ID NO: 8761 - protein, 9 aa, Homo sapiens
KLQEALKTI

SEQ ID NO: 8762 - protein, 11 aa, Homo sapiens
KLQEESDLELA

SEQ ID NO: 8763 - protein, 9 aa, Homo sapiens
KLQESTQTV

SEQ ID NO: 8764 - protein, 10 aa, Homo sapiens
KLQEVGQVSV

SEQ ID NO: 8765 - protein, 9 aa, Homo sapiens
KLQIVEMPL

SEQ ID NO: 8766 - protein, 10 aa, Homo sapiens
KLQIVEMPLA

SEQ ID NO: 8767 - protein, 9 aa, Homo sapiens
KLQLVEMPL

SEQ ID NO: 8768 - protein, 10 aa, Homo sapiens
KLQLVEMPLA

SEQ ID NO: 8769 - protein, 10 aa, Homo sapiens
KLQPGSVPKI

SEQ ID NO: 8770 - protein, 9 aa, Homo sapiens
KLQSSEAEV

SEQ ID NO: 8771 - protein, 11 aa, Homo sapiens
KLSDGVAVLKV

SEQ ID NO: 8772 - protein, 9 aa, Homo sapiens
KLSEENRHL

SEQ ID NO: 8773 - protein, 9 aa, Homo sapiens
KLSELKETV

SEQ ID NO: 8774 - protein, 10 aa, Homo sapiens
KLSLVAAMLL

SEQ ID NO: 8775 - protein, 11 aa, Homo sapiens
KLSLVAAMLLL

SEQ ID NO: 8776 - protein, 9 aa, Homo sapiens
KLSSAMSAA

SEQ ID NO: 8777 - protein, 9 aa, Homo sapiens
KLSSKLSAV

SEQ ID NO: 8778 - protein, 9 aa, Toxoplasma gondii GT1
KLTGMAFRV

SEQ ID NO: 8779 - protein, 12 aa, Homo sapiens
KLVDQNIFSFYL

SEQ ID NO: 8780 - protein, 9 aa, Homo sapiens
KLVPFATEL

SEQ ID NO: 8781 - protein, 9 aa, Homo sapiens
KLVTDLTKV

SEQ ID NO: 8782 - protein, 9 aa, Homo sapiens
KLWEFFQVD

SEQ ID NO: 8783 - protein, 12 aa, Homo sapiens
KLWTLVSEQTRV

SEQ ID NO: 8784 - protein, 12 aa, Homo sapiens
KLYSPSQIGAFV

SEQ ID NO: 8785 - protein, 10 aa, Homo sapiens
KMASLYNIHL

SEQ ID NO: 8786 - protein, 9 aa, Homo sapiens
KMDHLMTKV

SEQ ID NO: 8787 - protein, 9 aa, Homo sapiens
KMFAGVSSI

SEQ ID NO: 8788 - protein, 10 aa, Homo sapiens
KMMANGILKV

SEQ ID NO: 8789 - protein, 9 aa, Homo sapiens
KMMDLEHKV

SEQ ID NO: 8790 - protein, 9 aa, Homo sapiens
KMNEKLYTV

SEQ ID NO: 8791 - protein, 9 aa, Homo sapiens
KMPNGSAGV

SEQ ID NO: 8792 - protein, 9 aa, Homo sapiens
KMQASIEKA

SEQ ID NO: 8793 - protein, 9 aa, Homo sapiens
KMQESNHLL

SEQ ID NO: 8794 - protein, 9 aa, Homo sapiens
KMSEITKQL

SEQ ID NO: 8795 - protein, 10 aa, Homo sapiens
KMSVQPTVSL

SEQ ID NO: 8796 - protein, 9 aa, Homo sapiens
KMTDVESGV

SEQ ID NO: 8797 - protein, 11 aa, Homo sapiens
KMTEEEVEMLV

SEQ ID NO: 8798 - protein, 12 aa, Homo sapiens
KMVVIGAGVIGV

SEQ ID NO: 8799 - protein, 9 aa, Homo sapiens
KMWEKAIKL

SEQ ID NO: 8800 - protein, 11 aa, Homo sapiens
KQIVWNGPVGV

SEQ ID NO: 8801 - protein, 10 aa, Homo sapiens
KQMGFPLIYV

SEQ ID NO: 8802 - protein, 9 aa, Homo sapiens
KQQASQVLV

SEQ ID NO: 8803 - protein, 10 aa, Homo sapiens
KQQSELQSQV

SEQ ID NO: 8804 - protein, 9 aa, Homo sapiens
KQSNVQILV

SEQ ID NO: 8805 - protein, 9 aa, Homo sapiens
KQVSDLISV

SEQ ID NO: 8806 - protein, 9 aa, Homo sapiens
KTIETSPSL

SEQ ID NO: 8807 - protein, 9 aa, Homo sapiens
KTILTLTGV

SEQ ID NO: 8808 - protein, 11 aa, Homo sapiens
KVDNDENEHQL

SEQ ID NO: 8809 - protein, 9 aa, Homo sapiens
KVGDAIPAV

SEQ ID NO: 8810 - protein, 11 aa, Homo sapiens
KVLDVSDLESV

SEQ ID NO: 8811 - protein, 9 aa, Homo sapiens
KVLEFLAKV

SEQ ID NO: 8812 - protein, 9 aa, Homo sapiens
KVLETLVTV

SEQ ID NO: 8813 - protein, 11 aa, Homo sapiens
KVLEVTEEFGV

SEQ ID NO: 8814 - protein, 9 aa, Homo sapiens
KVNTPTTTV

SEQ ID NO: 8815 - protein, 9 aa, Homo sapiens
KVTKDGVTV

SEQ ID NO: 8816 - protein, 9 aa, Homo sapiens
KYTDWTEFL

SEQ ID NO: 8817 - protein, 9 aa, Homo sapiens
LAASALPAL

SEQ ID NO: 8818 - protein, 9 aa, Homo sapiens
LAGEIYVMV

SEQ ID NO: 8819 - protein, 9 aa, Homo sapiens
LAQANGWGV

SEQ ID NO: 8820 - protein, 9 aa, Homo sapiens
LFQPHLINV

SEQ ID NO: 8821 - protein, 11 aa, Homo sapiens
LFYADHPFIFL

SEQ ID NO: 8822 - protein, 8 aa, Homo sapiens
LIDHQTYL

SEQ ID NO: 8823 - protein, 12 aa, Homo sapiens
LIFDLGGGTFDV

SEQ ID NO: 8824 - protein, 9 aa, Homo sapiens
LIMELINNV

SEQ ID NO: 8825 - protein, 9 aa, Homo sapiens
LINVGLISV

SEQ ID NO: 8826 - protein, 8 aa, Homo sapiens
LLADAVAV

SEQ ID NO: 8827 - protein, 10 aa, Homo sapiens
LLAEGTITGV

SEQ ID NO: 8828 - protein, 9 aa, Homo sapiens
LLAKQPPTA

SEQ ID NO: 8829 - protein, 9 aa, Homo sapiens
LLASINSTV

SEQ ID NO: 8830 - protein, 10 aa, Homo sapiens
LLDAAGVASL

SEQ ID NO: 8831 - protein, 9 aa, Homo sapiens
LLDEQQVNV

SEQ ID NO: 8832 - protein, 9 aa, Homo sapiens
LLDGFPRTV

SEQ ID NO: 8833 - protein, 9 aa, Homo sapiens
LLDKVYSSV

SEQ ID NO: 8834 - protein, 9 aa, Homo sapiens
LLDLFSPSV

SEQ ID NO: 8835 - protein, 10 aa, Homo sapiens
LLDNEKPAAV

SEQ ID NO: 8836 - protein, 10 aa, Homo sapiens
LLDNFKPEEL

SEQ ID NO: 8837 - protein, 9 aa, Homo sapiens
LLDSVPPTA

SEQ ID NO: 8838 - protein, 9 aa, Homo sapiens
LLDTSRHYL

SEQ ID NO: 8839 - protein, 9 aa, Homo sapiens
LLDTWDQVF

SEQ ID NO: 8840 - protein, 8 aa, Homo sapiens
LLDVTPLS

SEQ ID NO: 8841 - protein, 9 aa, Homo sapiens
LLDVTPNAV

SEQ ID NO: 8842 - protein, 9 aa, Homo sapiens
LLDYHLNYL

SEQ ID NO: 8843 - protein, 10 aa, Homo sapiens
LLEGKVLPGV

SEQ ID NO: 8844 - protein, 9 aa, Homo sapiens
LLFGSIVAV

SEQ ID NO: 8845 - protein, 10 aa, Homo sapiens
LLFPHPVNQV

SEQ ID NO: 8846 - protein, 11 aa, Homo sapiens
LLFPPAEALQV

SEQ ID NO: 8847 - protein, 11 aa, Homo sapiens
LLGDALLVHPV

SEQ ID NO: 8848 - protein, 10 aa, Homo sapiens
LLGELPRLLL

SEQ ID NO: 8849 - protein, 11 aa, Homo sapiens
LLGELPRLLLL

SEQ ID NO: 8850 - protein, 9 aa, Homo sapiens
LLGKDVLFL

SEQ ID NO: 8851 - protein, 8 aa, Homo sapiens
LLGKVYVV

SEQ ID NO: 8852 - protein, 10 aa, Homo sapiens
LLGQFTLIGI

SEQ ID NO: 8853 - protein, 9 aa, Homo sapiens
LLGRIPSAV

SEQ ID NO: 8854 - protein, 9 aa, Homo sapiens
LLHEIENHL

SEQ ID NO: 8855 - protein, 11 aa, Homo sapiens
LLHESLFGSVA

SEQ ID NO: 8856 - protein, 12 aa, Homo sapiens
LLHSFEEFEALA

SEQ ID NO: 8857 - protein, 10 aa, Homo sapiens
LLLDVAPLSL

SEQ ID NO: 8858 - protein, 12 aa, Homo sapiens
LLLGERVALNTL

SEQ ID NO: 8859 - protein, 11 aa, Homo sapiens
LLLHLPALQSV

SEQ ID NO: 8860 - protein, 9 aa, Homo sapiens
LLLKNSPLV

SEQ ID NO: 8861 - protein, 9 aa, Homo sapiens
LLLPILVTV

SEQ ID NO: 8862 - protein, 9 aa, Homo sapiens
LLLPLNLEV

SEQ ID NO: 8863 - protein, 9 aa, Homo sapiens
LLLSGPPEV

SEQ ID NO: 8864 - protein, 9 aa, Homo sapiens
LLLSLLPAL

SEQ ID NO: 8865 - protein, 9 aa, Homo sapiens
LLMDSVIQA

SEQ ID NO: 8866 - protein, 9 aa, Homo sapiens
LLMGEQFLV

SEQ ID NO: 8867 - protein, 9 aa, Homo sapiens
LLMNIGPTL

SEQ ID NO: 8868 - protein, 10 aa, Homo sapiens
LLPEYGGTKV

SEQ ID NO: 8869 - protein, 9 aa, Homo sapiens
LLPHAAPFA

SEQ ID NO: 8870 - protein, 9 aa, Homo sapiens
LLPPPPPVA

SEQ ID NO: 8871 - protein, 9 aa, Homo sapiens
LLPPVTLAA

SEQ ID NO: 8872 - protein, 11 aa, Homo sapiens
LLPPVTLAALV

SEQ ID NO: 8873 - protein, 11 aa, Homo sapiens
LLQDFFDGRDL

SEQ ID NO: 8874 - protein, 11 aa, Homo sapiens
LLQDFFNGKEL

SEQ ID NO: 8875 - protein, 8 aa, Homo sapiens
LLQDGEFS

SEQ ID NO: 8876 - protein, 9 aa, Homo sapiens
LLQDGEFSM

SEQ ID NO: 8877 - protein, 9 aa, Homo sapiens
LLQEEVTKV

SEQ ID NO: 8878 - protein, 12 aa, Homo sapiens
LLQELEDLELGI

SEQ ID NO: 8879 - protein, 11 aa, Homo sapiens
LLQHTSEQEEM

SEQ ID NO: 8880 - protein, 9 aa, Homo sapiens
LLQKFVPEI

SEQ ID NO: 8881 - protein, 9 aa, Homo sapiens
LLQMITIHL

SEQ ID NO: 8882 - protein, 11 aa, Homo sapiens
LLSAEVARLLL

SEQ ID NO: 8883 - protein, 9 aa, Homo sapiens
LLSDPIPEV

SEQ ID NO: 8884 - protein, 9 aa, Homo sapiens
LLSDVFPGV

SEQ ID NO: 8885 - protein, 9 aa, Homo sapiens
LLSEADVRA

SEQ ID NO: 8886 - protein, 9 aa, Homo sapiens
LLSELAPSL

SEQ ID NO: 8887 - protein, 9 aa, Homo sapiens
LLSPLSVAT

SEQ ID NO: 8888 - protein, 9 aa, Homo sapiens
LLSPLVLEV

SEQ ID NO: 8889 - protein, 9 aa, Homo sapiens
LLSSVDQPL

SEQ ID NO: 8890 - protein, 12 aa, Homo sapiens
LLTDEEDVDMAL

SEQ ID NO: 8891 - protein, 11 aa, Homo sapiens
LLTEEEFLSFL

SEQ ID NO: 8892 - protein, 9 aa, Homo sapiens
LLTEMIHEA

SEQ ID NO: 8893 - protein, 9 aa, Homo sapiens
LLTTAEVVV

SEQ ID NO: 8894 - protein, 9 aa, Homo sapiens
LLTTQSPSV

SEQ ID NO: 8895 - protein, 9 aa, Homo sapiens
LLWAGSAGL

SEQ ID NO: 8896 - protein, 12 aa, Homo sapiens
LLWALEPEKPLV

SEQ ID NO: 8897 - protein, 9 aa, Homo sapiens
LLYDRSWMV

SEQ ID NO: 8898 - protein, 9 aa, Homo sapiens
LLYGKYVSV

SEQ ID NO: 8899 - protein, 9 aa, Homo sapiens
LLYPTEITV

SEQ ID NO: 8900 - protein, 8 aa, Homo sapiens
LLYSFPVV

SEQ ID NO: 8901 - protein, 9 aa, Homo sapiens
LLYSFPVVI

SEQ ID NO: 8902 - protein, 9 aa, Homo sapiens
LMADVHFVV

SEQ ID NO: 8903 - protein, 9 aa, Homo sapiens
LMAEEVQAV

SEQ ID NO: 8904 - protein, 9 aa, Homo sapiens
LMKLSHETV

SEQ ID NO: 8905 - protein, 11 aa, Homo sapiens
LMNGSESRFFV

SEQ ID NO: 8906 - protein, 9 aa, Homo sapiens
LMNPNIASV

SEQ ID NO: 8907 - protein, 8 aa, Homo sapiens
LMTTVHAI

SEQ ID NO: 8908 - protein, 10 aa, Homo sapiens
LMTTVHAITA

SEQ ID NO: 8909 - protein, 8 aa, Homo sapiens
LQEMVHQV

SEQ ID NO: 8910 - protein, 10 aa, Homo sapiens
LTIDDGIFEV

SEQ ID NO: 8911 - protein, 11 aa, Homo sapiens
LTNDWEDHLAV

SEQ ID NO: 8912 - protein, 9 aa, Homo sapiens
LTPDNVANL

SEQ ID NO: 8913 - protein, 11 aa, Homo sapiens
LVEDFLSGFQV

SEQ ID NO: 8914 - protein, 12 aa, Homo sapiens
LVFDLGGGTFDV

SEQ ID NO: 8915 - protein, 9 aa, Homo sapiens
LVGTVTKPV

SEQ ID NO: 8916 - protein, 11 aa, Homo sapiens
LVLEVDPNIQA

SEQ ID NO: 8917 - protein, 12 aa, Homo sapiens
LVLEVDPNIQAV

SEQ ID NO: 8918 - protein, 10 aa, Homo sapiens
MLAEKLPNLT

SEQ ID NO: 8919 - protein, 12 aa, Homo sapiens
MLAEKLPNLTHL

SEQ ID NO: 8920 - protein, 9 aa, Homo sapiens
MLAEVNATI

SEQ ID NO: 8921 - protein, 11 aa, Homo sapiens
MLANDIARLMV

SEQ ID NO: 8922 - protein, 11 aa, Homo sapiens
MLAVDAVIAEL

SEQ ID NO: 8923 - protein, 9 aa, Homo sapiens
MLDEPTNHL

SEQ ID NO: 8924 - protein, 10 aa, Homo sapiens
MLDNLLDIEV

SEQ ID NO: 8925 - protein, 12 aa, Homo sapiens
MLKEWEKFQEEA

SEQ ID NO: 8926 - protein, 10 aa, Homo sapiens
MLLDTWDQVF

SEQ ID NO: 8927 - protein, 10 aa, Homo sapiens
MLLGASLVGV

SEQ ID NO: 8928 - protein, 11 aa, Homo sapiens
MLMGFKPLVLL

SEQ ID NO: 8929 - protein, 9 aa, Homo sapiens
MLQDFQIQA

SEQ ID NO: 8930 - protein, 11 aa, Homo sapiens
MLQGVDLLADA

SEQ ID NO: 8931 - protein, 9 aa, Homo sapiens
MLSEVLQYI

SEQ ID NO: 8932 - protein, 11 aa, Homo sapiens
MLVSGAGDIKL

SEQ ID NO: 8933 - protein, 11 aa, Homo sapiens
MLWGSDPYPHA

SEQ ID NO: 8934 - protein, 9 aa, Homo sapiens
MLYEGFYDV

SEQ ID NO: 8935 - protein, 11 aa, Homo sapiens
MLYGRIGYIYA

SEQ ID NO: 8936 - protein, 11 aa, Homo sapiens
MMDLQHGSLFL

SEQ ID NO: 8937 - protein, 8 aa, Homo sapiens
MMDVDHQI

SEQ ID NO: 8938 - protein, 9 aa, Homo sapiens
MMVGDLLEV

SEQ ID NO: 8939 - protein, 11 aa, Homo sapiens
MTADAAKRLNV

SEQ ID NO: 8940 - protein, 9 aa, Homo sapiens
MTLGQIYYL

SEQ ID NO: 8941 - protein, 11 aa, Homo sapiens
NIGDLASILKV

SEQ ID NO: 8942 - protein, 10 aa, Homo sapiens
NIMDIKIGLL

SEQ ID NO: 8943 - protein, 11 aa, Homo sapiens
NIMDIKIGLLV

SEQ ID NO: 8944 - protein, 9 aa, Homo sapiens
NISPFSFGL

SEQ ID NO: 8945 - protein, 9 aa, Homo sapiens
NLAAYVPLL

SEQ ID NO: 8946 - protein, 9 aa, Homo sapiens
NLAEELEGV

SEQ ID NO: 8947 - protein, 10 aa, Homo sapiens
NLEFLSLINV

SEQ ID NO: 8948 - protein, 12 aa, Homo sapiens
NLFDISTEEGST

SEQ ID NO: 8949 - protein, 12 aa, Homo sapiens
NLFGRGMDIERV

SEQ ID NO: 8950 - protein, 12 aa, Homo sapiens
NLFPGLKEAFVV

SEQ ID NO: 8951 - protein, 9 aa, Homo sapiens
NLISLLEVL

SEQ ID NO: 8952 - protein, 10 aa, Homo sapiens
NLKAAQEEYV

SEQ ID NO: 8953 - protein, 11 aa, Homo sapiens
NLLDLLLIHEV

SEQ ID NO: 8954 - protein, 9 aa, Homo sapiens
NLLDLLTEV

SEQ ID NO: 8955 - protein, 11 aa, Homo sapiens
NLLDLLTEVGV

SEQ ID NO: 8956 - protein, 10 aa, Homo sapiens
NLMDIKIGLL

SEQ ID NO: 8957 - protein, 11 aa, Homo sapiens
NLMDIKIGLLV

SEQ ID NO: 8958 - protein, 11 aa, Homo sapiens
NLPAPHIMPGV

SEQ ID NO: 8959 - protein, 11 aa, Homo sapiens
NLWGGQGLLGV

SEQ ID NO: 8960 - protein, 10 aa, Homo sapiens
NLYGSHPFYL

SEQ ID NO: 8961 - protein, 10 aa, Homo sapiens
NLYSDDIPHA

SEQ ID NO: 8962 - protein, 11 aa, Homo sapiens
NTAVVPQGWSV

SEQ ID NO: 8963 - protein, 11 aa, Homo sapiens
PLDPGGHLHLL

SEQ ID NO: 8964 - protein, 11 aa, Homo sapiens
PLMSEDELINI

SEQ ID NO: 8965 - protein, 9 aa, Homo sapiens
QFINFPIYV

SEQ ID NO: 8966 - protein, 10 aa, Homo sapiens
QLADLYKSFI

SEQ ID NO: 8967 - protein, 9 aa, Homo sapiens
QLAEMLPGV

SEQ ID NO: 8968 - protein, 10 aa, Homo sapiens
QLEEEGITFV

SEQ ID NO: 8969 - protein, 12 aa, Homo sapiens
QLFDDESDPFEV

SEQ ID NO: 8970 - protein, 9 aa, Homo sapiens
QLFEDLVYL

SEQ ID NO: 8971 - protein, 9 aa, Homo sapiens
QLISKIPHI

SEQ ID NO: 8972 - protein, 11 aa, Homo sapiens
QLLAERSLAPT

SEQ ID NO: 8973 - protein, 9 aa, Homo sapiens
QLLDNPARV

SEQ ID NO: 8974 - protein, 9 aa, Homo sapiens
QLLGSAHEV

SEQ ID NO: 8975 - protein, 9 aa, Homo sapiens
QLLPLVFEV

SEQ ID NO: 8976 - protein, 11 aa, Homo sapiens
QLMHNIRDIDV

SEQ ID NO: 8977 - protein, 9 aa, Homo sapiens
QLMSLIINT

SEQ ID NO: 8978 - protein, 9 aa, Homo sapiens
QLNADEISL

SEQ ID NO: 8979 - protein, 9 aa, Homo sapiens
QLQDFYQEV

SEQ ID NO: 8980 - protein, 9 aa, Homo sapiens
QLSEIQTQI

SEQ ID NO: 8981 - protein, 9 aa, Homo sapiens
QLWNGIISI

SEQ ID NO: 8982 - protein, 8 aa, Homo sapiens
QLYPISIF

SEQ ID NO: 8983 - protein, 9 aa, Homo sapiens
QLYPISIFI

SEQ ID NO: 8984 - protein, 9 aa, Homo sapiens
QMFEGVARV

SEQ ID NO: 8985 - protein, 9 aa, Homo sapiens
QVAELELQL

SEQ ID NO: 8986 - protein, 12 aa, Homo sapiens
QVWDYEEGEVEA

SEQ ID NO: 8987 - protein, 9 aa, Homo sapiens
RILSKLHTV

SEQ ID NO: 8988 - protein, 9 aa, Homo sapiens
RIMEKIRNV

SEQ ID NO: 8989 - protein, 9 aa, Homo sapiens
RLADKSVLV

SEQ ID NO: 8990 - protein, 9 aa, Homo sapiens
RLAEAHAKV

SEQ ID NO: 8991 - protein, 9 aa, Homo sapiens
RLAKYNQLL

SEQ ID NO: 8992 - protein, 12 aa, Homo sapiens
RLAPALALPAPA

SEQ ID NO: 8993 - protein, 10 aa, Homo sapiens
RLATYGITVA

SEQ ID NO: 8994 - protein, 8 aa, Homo sapiens
RLDDFFKV

SEQ ID NO: 8995 - protein, 9 aa, Homo sapiens
RLDFNLIRV

SEQ ID NO: 8996 - protein, 9 aa, Homo sapiens
RLDTHPAMV

SEQ ID NO: 8997 - protein, 9 aa, Homo sapiens
RLFPGRVSV

SEQ ID NO: 8998 - protein, 9 aa, Homo sapiens
RLFSMAHTV

SEQ ID NO: 8999 - protein, 9 aa, Homo sapiens
RLHDNVHAV

SEQ ID NO: 9000 - protein, 10 aa, Homo sapiens
RLIDHLHNCP

SEQ ID NO: 9001 - protein, 11 aa, Homo sapiens
RLIGDAAKNQL

SEQ ID NO: 9002 - protein, 9 aa, Homo sapiens
RLIKAYEKV

SEQ ID NO: 9003 - protein, 10 aa, Homo sapiens
RLLDTKNPSL

SEQ ID NO: 9004 - protein, 11 aa, Homo sapiens
RLLPSIGLSTV

SEQ ID NO: 9005 - protein, 9 aa, Homo sapiens
RLMEPIYLV

SEQ ID NO: 9006 - protein, 9 aa, Homo sapiens
RLQAFDFLL

SEQ ID NO: 9007 - protein, 8 aa, Homo sapiens
RLYDGLFK

SEQ ID NO: 9008 - protein, 10 aa, Homo sapiens
RLYQSNLVLV

SEQ ID NO: 9009 - protein, 9 aa, Homo sapiens
RMGPPLHTV

SEQ ID NO: 9010 - protein, 11 aa, Homo sapiens
RMLDMGFEPQI

SEQ ID NO: 9011 - protein, 9 aa, Homo sapiens
RQADKVWRL

SEQ ID NO: 9012 - protein, 9 aa, Homo sapiens
RQDENTPSV

SEQ ID NO: 9013 - protein, 9 aa, Homo sapiens
RQHEIVLKV

SEQ ID NO: 9014 - protein, 10 aa, Homo sapiens
RQLDMELVSV

SEQ ID NO: 9015 - protein, 9 aa, Homo sapiens
RQVEKAWAL

SEQ ID NO: 9016 - protein, 11 aa, Homo sapiens
RVDPNGSRYLL

SEQ ID NO: 9017 - protein, 12 aa, Homo sapiens
RVFSSSQGVEQV

SEQ ID NO: 9018 - protein, 9 aa, Homo sapiens
RVIISAPSA

SEQ ID NO: 9019 - protein, 11 aa, Homo sapiens
RVLANPGNSQV

SEQ ID NO: 9020 - protein, 12 aa, Homo sapiens
RVLSIGDGIARV

SEQ ID NO: 9021 - protein, 9 aa, Homo sapiens
RVPTANVSV

SEQ ID NO: 9022 - protein, 9 aa, Homo sapiens
SASLLWNFI

SEQ ID NO: 9023 - protein, 9 aa, Homo sapiens
SIADLLPAL

SEQ ID NO: 9024 - protein, 10 aa, Homo sapiens
SIDIPSGWDV

SEQ ID NO: 9025 - protein, 12 aa, Homo sapiens
SIFDGFADGLGV

SEQ ID NO: 9026 - protein, 10 aa, Homo sapiens
SIFGLAPSKA

SEQ ID NO: 9027 - protein, 10 aa, Homo sapiens
SIFGLGLAYA

SEQ ID NO: 9028 - protein, 11 aa, Homo sapiens
SIGEPTVPSTL

SEQ ID NO: 9029 - protein, 9 aa, Homo sapiens
SIHKFVPYL

SEQ ID NO: 9030 - protein, 11 aa, Homo sapiens
SIIDFYPEDFA

SEQ ID NO: 9031 - protein, 11 aa, Homo sapiens
SIIMLEALERV

SEQ ID NO: 9032 - protein, 12 aa, Homo sapiens
SILTIDDGIFEV

SEQ ID NO: 9033 - protein, 12 aa, Homo sapiens
SILTIEDGIFEV

SEQ ID NO: 9034 - protein, 10 aa, Homo sapiens
SIMGIGPIPA

SEQ ID NO: 9035 - protein, 9 aa, Homo sapiens
SIQSIVPAL

SEQ ID NO: 9036 - protein, 11 aa, Homo sapiens
SIQSIVPALEI

SEQ ID NO: 9037 - protein, 9 aa, Homo sapiens
SISSTPPAV

SEQ ID NO: 9038 - protein, 9 aa, Homo sapiens
SIYQFLIAV

SEQ ID NO: 9039 - protein, 9 aa, Homo sapiens
SLAAFLPDL

SEQ ID NO: 9040 - protein, 12 aa, Homo sapiens
SLAAFLPDLSLA

SEQ ID NO: 9041 - protein, 9 aa, Homo sapiens
SLAANTFTI

SEQ ID NO: 9042 - protein, 9 aa, Homo sapiens
SLAAPTWLV

SEQ ID NO: 9043 - protein, 10 aa, Homo sapiens
SLAAVSGTAA

SEQ ID NO: 9044 - protein, 9 aa, Homo sapiens
SLADELALV

SEQ ID NO: 9045 - protein, 11 aa, Homo sapiens
SLADELALVDV

SEQ ID NO: 9046 - protein, 12 aa, Homo sapiens
SLADELALVDVL

SEQ ID NO: 9047 - protein, 9 aa, Homo sapiens
SLADLMPRV

SEQ ID NO: 9048 - protein, 12 aa, Homo sapiens
SLADLQNDEVAF

SEQ ID NO: 9049 - protein, 10 aa, Homo sapiens
SLADVIIHEI

SEQ ID NO: 9050 - protein, 9 aa, Homo sapiens
SLAEKVIPA

SEQ ID NO: 9051 - protein, 9 aa, Homo sapiens
SLAELPAIM

SEQ ID NO: 9052 - protein, 9 aa, Homo sapiens
SLAEVNTQI

SEQ ID NO: 9053 - protein, 10 aa, Homo sapiens
SLAGSSGPGA

SEQ ID NO: 9054 - protein, 10 aa, Homo sapiens
SLAPAGVIRV

SEQ ID NO: 9055 - protein, 9 aa, Homo sapiens
SLAPIIVFV

SEQ ID NO: 9056 - protein, 9 aa, Homo sapiens
SLAPIIVYV

SEQ ID NO: 9057 - protein, 9 aa, Homo sapiens
SLAPQIKVI

SEQ ID NO: 9058 - protein, 10 aa, Homo sapiens
SLASLPPLHV

SEQ ID NO: 9059 - protein, 9 aa, Homo sapiens
SLASVIFLL

SEQ ID NO: 9060 - protein, 11 aa, Homo sapiens
SLAVDPNGIYL

SEQ ID NO: 9061 - protein, 9 aa, Homo sapiens
SLDDFQAWL

SEQ ID NO: 9062 - protein, 9 aa, Homo sapiens
SLDDLLTNV

SEQ ID NO: 9063 - protein, 12 aa, Homo sapiens
SLDDSVDETEAV

SEQ ID NO: 9064 - protein, 9 aa, Homo sapiens
SLDDTELRL

SEQ ID NO: 9065 - protein, 10 aa, Homo sapiens
SLDDVEGMSV

SEQ ID NO: 9066 - protein, 10 aa, Homo sapiens
SLDEDSEFTL

SEQ ID NO: 9067 - protein, 11 aa, Homo sapiens
SLDEDSEFTLA

SEQ ID NO: 9068 - protein, 9 aa, Homo sapiens
SLDEELDRV

SEQ ID NO: 9069 - protein, 11 aa, Homo sapiens
SLDEIEQVILV

SEQ ID NO: 9070 - protein, 11 aa, Homo sapiens
SLDESTQESKL

SEQ ID NO: 9071 - protein, 9 aa, Homo sapiens
SLDGAPIGV

SEQ ID NO: 9072 - protein, 9 aa, Homo sapiens
SLDGIPFTV

SEQ ID NO: 9073 - protein, 9 aa, Homo sapiens
SLDGKAIKV

SEQ ID NO: 9074 - protein, 12 aa, Homo sapiens
SLDKFLASVSTV

SEQ ID NO: 9075 - protein, 9 aa, Homo sapiens
SLDKTSPEM

SEQ ID NO: 9076 - protein, 11 aa, Homo sapiens
SLDLDGIIAEV

SEQ ID NO: 9077 - protein, 9 aa, Homo sapiens
SLDLFNCEV

SEQ ID NO: 9078 - protein, 9 aa, Homo sapiens
SLDLSSPNM

SEQ ID NO: 9079 - protein, 11 aa, Homo sapiens
SLDMDSIIAEV

SEQ ID NO: 9080 - protein, 9 aa, Homo sapiens
SLDNLKASV

SEQ ID NO: 9081 - protein, 9 aa, Homo sapiens
SLDPHAQVA

SEQ ID NO: 9082 - protein, 11 aa, Homo sapiens
SLDPTAGSLSV

SEQ ID NO: 9083 - protein, 9 aa, Homo sapiens
SLDQLELRV

SEQ ID NO: 9084 - protein, 9 aa, Homo sapiens
SLDQSVTHL

SEQ ID NO: 9085 - protein, 10 aa, Homo sapiens
SLDSLGDVFL

SEQ ID NO: 9086 - protein, 9 aa, Homo sapiens
SLDSSNASV

SEQ ID NO: 9087 - protein, 11 aa, Homo sapiens
SLEELPVDIIL

SEQ ID NO: 9088 - protein, 12 aa, Homo sapiens
SLEELPVDIILA

SEQ ID NO: 9089 - protein, 10 aa, Homo sapiens
SLFDEEGAKI

SEQ ID NO: 9090 - protein, 12 aa, Homo sapiens
SLFEEDKEDDLF

SEQ ID NO: 9091 - protein, 8 aa, Homo sapiens
SLFEEMLQ

SEQ ID NO: 9092 - protein, 9 aa, Homo sapiens
SLFEGIDFY

SEQ ID NO: 9093 - protein, 10 aa, Homo sapiens
SLFEGIDFYT

SEQ ID NO: 9094 - protein, 11 aa, Homo sapiens
SLFEGIDFYTS

SEQ ID NO: 9095 - protein, 10 aa, Homo sapiens
SLFEGTWYLV

SEQ ID NO: 9096 - protein, 9 aa, Homo sapiens
SLFEHFIEL

SEQ ID NO: 9097 - protein, 12 aa, Homo sapiens
SLFESLISPIKT

SEQ ID NO: 9098 - protein, 9 aa, Homo sapiens
SLFEWFHPL

SEQ ID NO: 9099 - protein, 10 aa, Homo sapiens
SLFEWFHPLF

SEQ ID NO: 9100 - protein, 11 aa, Homo sapiens
SLFEWFHPLFL

SEQ ID NO: 9101 - protein, 9 aa, Homo sapiens
SLFGFSFNA

SEQ ID NO: 9102 - protein, 11 aa, Homo sapiens
SLFGFSFNAPL

SEQ ID NO: 9103 - protein, 9 aa, Homo sapiens
SLFGGKPMI

SEQ ID NO: 9104 - protein, 10 aa, Homo sapiens
SLFGGKPMII

SEQ ID NO: 9105 - protein, 10 aa, Homo sapiens
SLFGGSVKLA

SEQ ID NO: 9106 - protein, 9 aa, Homo sapiens
SLFGKDIKV

SEQ ID NO: 9107 - protein, 12 aa, Homo sapiens
SLFGSVADDQKL

SEQ ID NO: 9108 - protein, 9 aa, Homo sapiens
SLFGYSVAL

SEQ ID NO: 9109 - protein, 12 aa, Homo sapiens
SLFKHDPAAWEA

SEQ ID NO: 9110 - protein, 12 aa, Homo sapiens
SLFLFDGSPTYV

SEQ ID NO: 9111 - protein, 11 aa, Homo sapiens
SLFLGQKLQVV

SEQ ID NO: 9112 - protein, 9 aa, Homo sapiens
SLFLQTPKI

SEQ ID NO: 9113 - protein, 12 aa, Homo sapiens
SLFLWVGATPHL

SEQ ID NO: 9114 - protein, 11 aa, Homo sapiens
SLFQAMQKGLV

SEQ ID NO: 9115 - protein, 12 aa, Homo sapiens
SLFQAMQKGLVL

SEQ ID NO: 9116 - protein, 9 aa, Homo sapiens
SLFSDEFKV

SEQ ID NO: 9117 - protein, 11 aa, Homo sapiens
SLFSDEFKVET

SEQ ID NO: 9118 - protein, 9 aa, Homo sapiens
SLFSEETPV

SEQ ID NO: 9119 - protein, 10 aa, Homo sapiens
SLFSEETPVV

SEQ ID NO: 9120 - protein, 10 aa, Homo sapiens
SLFTKELEHA

SEQ ID NO: 9121 - protein, 9 aa, Homo sapiens
SLGDAFPEL

SEQ ID NO: 9122 - protein, 10 aa, Homo sapiens
SLGDFIEHYA

SEQ ID NO: 9123 - protein, 10 aa, Homo sapiens
SLGEEIQESL

SEQ ID NO: 9124 - protein, 9 aa, Homo sapiens
SLGELIGTL

SEQ ID NO: 9125 - protein, 11 aa, Homo sapiens
SLGELIGTLNA

SEQ ID NO: 9126 - protein, 9 aa, Homo sapiens
SLGETQLVL

SEQ ID NO: 9127 - protein, 11 aa, Homo sapiens
SLGEVGHHIDL

SEQ ID NO: 9128 - protein, 11 aa, Homo sapiens
SLGGFEITPPV

SEQ ID NO: 9129 - protein, 12 aa, Homo sapiens
SLGGFEITPPVV

SEQ ID NO: 9130 - protein, 9 aa, Homo sapiens
SLGLPFGKV

SEQ ID NO: 9131 - protein, 9 aa, Homo sapiens
SLGPHPIPV

SEQ ID NO: 9132 - protein, 9 aa, Homo sapiens
SLGTRPPHV

SEQ ID NO: 9133 - protein, 9 aa, Homo sapiens
SLHDALCVV

SEQ ID NO: 9134 - protein, 9 aa, Homo sapiens
SLIDFLRVV

SEQ ID NO: 9135 - protein, 9 aa, Homo sapiens
SLIEESEEL

SEQ ID NO: 9136 - protein, 11 aa, Homo sapiens
SLINQIENLNI

SEQ ID NO: 9137 - protein, 11 aa, Homo sapiens
SLINVGLISVS

SEQ ID NO: 9138 - protein, 9 aa, Homo sapiens
SLIPDIKPL

SEQ ID NO: 9139 - protein, 10 aa, Homo sapiens
SLIPDIKPLA

SEQ ID NO: 9140 - protein, 9 aa, Homo sapiens
SLISSRIYV

SEQ ID NO: 9141 - protein, 11 aa, Homo sapiens
SLKDGLIPLEI

SEQ ID NO: 9142 - protein, 9 aa, Homo sapiens
SLKTFVHTV

SEQ ID NO: 9143 - protein, 10 aa, Homo sapiens
SLLAGKGFAV

SEQ ID NO: 9144 - protein, 8 aa, Homo sapiens
SLLAWTLL

SEQ ID NO: 9145 - protein, 11 aa, Homo sapiens
SLLDDQDGISL

SEQ ID NO: 9146 - protein, 9 aa, Homo sapiens
SLLDGHFVL

SEQ ID NO: 9147 - protein, 9 aa, Homo sapiens
SLLDIDPLI

SEQ ID NO: 9148 - protein, 11 aa, Homo sapiens
SLLDLLLPTGL

SEQ ID NO: 9149 - protein, 9 aa, Homo sapiens
SLLDNMIGV

SEQ ID NO: 9150 - protein, 11 aa, Homo sapiens
SLLDSDNFIGL

SEQ ID NO: 9151 - protein, 9 aa, Homo sapiens
SLLDSVVGL

SEQ ID NO: 9152 - protein, 9 aa, Homo sapiens
SLLDTLSPA

SEQ ID NO: 9153 - protein, 10 aa, Homo sapiens
SLLEEFDFHV

SEQ ID NO: 9154 - protein, 9 aa, Homo sapiens
SLLEFNTTV

SEQ ID NO: 9155 - protein, 11 aa, Homo sapiens
SLLEVLSGDSL

SEQ ID NO: 9156 - protein, 11 aa, Homo sapiens
SLLEVNEESTV

SEQ ID NO: 9157 - protein, 9 aa, Homo sapiens
SLLGATVTV

SEQ ID NO: 9158 - protein, 11 aa, Homo sapiens
SLLGGNIRLLL

SEQ ID NO: 9159 - protein, 8 aa, Homo sapiens
SLLGHLMI

SEQ ID NO: 9160 - protein, 10 aa, Homo sapiens
SLLGHLMIVG

SEQ ID NO: 9161 - protein, 9 aa, Homo sapiens
SLLGKDVLF

SEQ ID NO: 9162 - protein, 10 aa, Homo sapiens
SLLGKDVLFL

SEQ ID NO: 9163 - protein, 9 aa, Homo sapiens
SLLIDVITV

SEQ ID NO: 9164 - protein, 8 aa, Homo sapiens
SLLPFWYT

SEQ ID NO: 9165 - protein, 9 aa, Homo sapiens
SLLPFWYTL

SEQ ID NO: 9166 - protein, 11 aa, Homo sapiens
SLLPGKLPTLV

SEQ ID NO: 9167 - protein, 11 aa, Homo sapiens
SLLPGKLPTSV

SEQ ID NO: 9168 - protein, 9 aa, Homo sapiens
SLLPKLHIV

SEQ ID NO: 9169 - protein, 12 aa, Homo sapiens
SLLQDGEFSMDL

SEQ ID NO: 9170 - protein, 10 aa, Homo sapiens
SLLSDPIPEV

SEQ ID NO: 9171 - protein, 10 aa, Homo sapiens
SLLSEADVRA

SEQ ID NO: 9172 - protein, 11 aa, Homo sapiens
SLLSEADVRAL

SEQ ID NO: 9173 - protein, 9 aa, Homo sapiens
SLLSNLDEV

SEQ ID NO: 9174 - protein, 9 aa, Homo sapiens
SLLTHNENM

SEQ ID NO: 9175 - protein, 11 aa, Homo sapiens
SLLTHNENMVA

SEQ ID NO: 9176 - protein, 12 aa, Homo sapiens
SLLTIDNGVFEV

SEQ ID NO: 9177 - protein, 12 aa, Homo sapiens
SLLTIQEVDEFL

SEQ ID NO: 9178 - protein, 10 aa, Homo sapiens
SLLTTAEVVV

SEQ ID NO: 9179 - protein, 9 aa, Homo sapiens
SLMADLEGL

SEQ ID NO: 9180 - protein, 11 aa, Homo sapiens
SLMADLEGLHL

SEQ ID NO: 9181 - protein, 10 aa, Homo sapiens
SLMDDYLGLV

SEQ ID NO: 9182 - protein, 10 aa, Homo sapiens
SLMDGLGAKV

SEQ ID NO: 9183 - protein, 11 aa, Homo sapiens
SLMDPNKFLLL

SEQ ID NO: 9184 - protein, 11 aa, Homo sapiens
SLMEQVSGVEA

SEQ ID NO: 9185 - protein, 11 aa, Homo sapiens
SLMETGWFDNL

SEQ ID NO: 9186 - protein, 12 aa, Homo sapiens
SLMETGWFDNLL

SEQ ID NO: 9187 - protein, 10 aa, Homo sapiens
SLMGIKMTTV

SEQ ID NO: 9188 - protein, 9 aa, Homo sapiens
SLMHTIYEV

SEQ ID NO: 9189 - protein, 9 aa, Homo sapiens
SLMIDLIEV

SEQ ID NO: 9190 - protein, 9 aa, Homo sapiens
SLMLVTVEL

SEQ ID NO: 9191 - protein, 9 aa, Homo sapiens
SLMNIQHFL

SEQ ID NO: 9192 - protein, 11 aa, Homo sapiens
SLMPYFLLTQA

SEQ ID NO: 9193 - protein, 10 aa, Homo sapiens
SLMTKEISSV

SEQ ID NO: 9194 - protein, 11 aa, Homo sapiens
SLNDLEKDVML

SEQ ID NO: 9195 - protein, 11 aa, Homo sapiens
SLNEFGEKWEL

SEQ ID NO: 9196 - protein, 9 aa, Homo sapiens
SLNFVSTLL

SEQ ID NO: 9197 - protein, 9 aa, Homo sapiens
SLNKYIEEM

SEQ ID NO: 9198 - protein, 9 aa, Homo sapiens
SLNTDQTTA

SEQ ID NO: 9199 - protein, 9 aa, Homo sapiens
SLPKGVVEV

SEQ ID NO: 9200 - protein, 12 aa, Homo sapiens
SLPLSVGQPASI

SEQ ID NO: 9201 - protein, 10 aa, Homo sapiens
SLQACKLAQA

SEQ ID NO: 9202 - protein, 11 aa, Homo sapiens
SLQDIGMDHQA

SEQ ID NO: 9203 - protein, 12 aa, Homo sapiens
SLQDIGMDHQAL

SEQ ID NO: 9204 - protein, 9 aa, Homo sapiens
SLQDIIAIL

SEQ ID NO: 9205 - protein, 8 aa, Homo sapiens
SLQEEIAF

SEQ ID NO: 9206 - protein, 9 aa, Homo sapiens
SLQEELSLA

SEQ ID NO: 9207 - protein, 9 aa, Homo sapiens
SLQEFINWL

SEQ ID NO: 9208 - protein, 11 aa, Homo sapiens
SLQELFLAHIL

SEQ ID NO: 9209 - protein, 9 aa, Homo sapiens
SLQELNPEM

SEQ ID NO: 9210 - protein, 9 aa, Homo sapiens
SLQENLESL

SEQ ID NO: 9211 - protein, 10 aa, Homo sapiens
SLQESILAQV

SEQ ID NO: 9212 - protein, 9 aa, Homo sapiens
SLQMYLERL

SEQ ID NO: 9213 - protein, 9 aa, Homo sapiens
SLQNGVTAA

SEQ ID NO: 9214 - protein, 11 aa, Homo sapiens
SLQPLPVILHV

SEQ ID NO: 9215 - protein, 10 aa, Homo sapiens
SLQSGSIPLA

SEQ ID NO: 9216 - protein, 9 aa, Homo sapiens
SLQSLETSV

SEQ ID NO: 9217 - protein, 11 aa, Homo sapiens
SLRVEGDNIYV

SEQ ID NO: 9218 - protein, 10 aa, Homo sapiens
SLSALIGEAV

SEQ ID NO: 9219 - protein, 9 aa, Homo sapiens
SLSDVSTFL

SEQ ID NO: 9220 - protein, 11 aa, Homo sapiens
SLSESEYIEEV

SEQ ID NO: 9221 - protein, 9 aa, Homo sapiens
SLSFLVPSL

SEQ ID NO: 9222 - protein, 9 aa, Homo sapiens
SLSGPPEKV

SEQ ID NO: 9223 - protein, 10 aa, Homo sapiens
SLSKLGDVYV

SEQ ID NO: 9224 - protein, 9 aa, Homo sapiens
SLSMVNHRL

SEQ ID NO: 9225 - protein, 9 aa, Homo sapiens
SLSNESNKV

SEQ ID NO: 9226 - protein, 12 aa, Homo sapiens
SLSNLQVTQPTV

SEQ ID NO: 9227 - protein, 9 aa, Homo sapiens
SLSRVNTTL

SEQ ID NO: 9228 - protein, 11 aa, Homo sapiens
SLSTAAGAAEL

SEQ ID NO: 9229 - protein, 9 aa, Homo sapiens
SLTEYLQNV

SEQ ID NO: 9230 - protein, 11 aa, Homo sapiens
SLTNDWEDHLA

SEQ ID NO: 9231 - protein, 12 aa, Homo sapiens
SLTNDWEDHLAV

SEQ ID NO: 9232 - protein, 9 aa, Homo sapiens
SLTSKIPAL

SEQ ID NO: 9233 - protein, 11 aa, Homo sapiens
SLTSKIPALAV

SEQ ID NO: 9234 - protein, 9 aa, Homo sapiens
SLTSQPHQV

SEQ ID NO: 9235 - protein, 11 aa, Homo sapiens
SLVEVNPAYSV

SEQ ID NO: 9236 - protein, 11 aa, Homo sapiens
SLVGKDVVVEL

SEQ ID NO: 9237 - protein, 11 aa, Homo sapiens
SLVSPASFENV

SEQ ID NO: 9238 - protein, 12 aa, Homo sapiens
SLYDEVAAQGEV

SEQ ID NO: 9239 - protein, 12 aa, Homo sapiens
SLYDILARGASV

SEQ ID NO: 9240 - protein, 11 aa, Homo sapiens
SLYEGIDFYTS

SEQ ID NO: 9241 - protein, 12 aa, Homo sapiens
SLYEGIDFYTSI

SEQ ID NO: 9242 - protein, 9 aa, Homo sapiens
SLYGGNAVV

SEQ ID NO: 9243 - protein, 11 aa, Homo sapiens
SLYGGNAVVEL

SEQ ID NO: 9244 - protein, 12 aa, Homo sapiens
SLYGGNAVVELV

SEQ ID NO: 9245 - protein, 8 aa, Homo sapiens
SLYGGTIT

SEQ ID NO: 9246 - protein, 9 aa, Homo sapiens
SLYIKDIWL

SEQ ID NO: 9247 - protein, 10 aa, Homo sapiens
SLYKNKEIFL

SEQ ID NO: 9248 - protein, 10 aa, Homo sapiens
SLYNEELVSM

SEQ ID NO: 9249 - protein, 12 aa, Homo sapiens
SLYNEELVSMNV

SEQ ID NO: 9250 - protein, 9 aa, Homo sapiens
SLYPIAVLI

SEQ ID NO: 9251 - protein, 9 aa, Homo sapiens
SLYPLTFIQ

SEQ ID NO: 9252 - protein, 10 aa, Homo sapiens
SLYPLTFIQV

SEQ ID NO: 9253 - protein, 11 aa, Homo sapiens
SLYPSLEDLKV

SEQ ID NO: 9254 - protein, 10 aa, Homo sapiens
SLYRPALEEL

SEQ ID NO: 9255 - protein, 10 aa, Homo sapiens
SLYSEKEVFI

SEQ ID NO: 9256 - protein, 9 aa, Homo sapiens
SLYTILTYI

SEQ ID NO: 9257 - protein, 9 aa, Homo sapiens
SMAEVDAAM

SEQ ID NO: 9258 - protein, 9 aa, Homo sapiens
SMDENLMHI

SEQ ID NO: 9259 - protein, 9 aa, Homo sapiens
SMDEYVHQI

SEQ ID NO: 9260 - protein, 9 aa, Homo sapiens
SMDNFNWGV

SEQ ID NO: 9261 - protein, 9 aa, Homo sapiens
SMGGKVPPA

SEQ ID NO: 9262 - protein, 9 aa, Homo sapiens
SMIFSIPYI

SEQ ID NO: 9263 - protein, 12 aa, Homo sapiens
SMLEQGKEPWTV

SEQ ID NO: 9264 - protein, 9 aa, Homo sapiens
SMLNDIAAV

SEQ ID NO: 9265 - protein, 9 aa, Homo sapiens
SMMDPNHFL

SEQ ID NO: 9266 - protein, 10 aa, Homo sapiens
SMMDVDHQIA

SEQ ID NO: 9267 - protein, 9 aa, Homo sapiens
SMPDIDLNL

SEQ ID NO: 9268 - protein, 9 aa, Homo sapiens
SMSDIDLNL

SEQ ID NO: 9269 - protein, 9 aa, Homo sapiens
SMSEVDLNV

SEQ ID NO: 9270 - protein, 9 aa, Homo sapiens
SMSGPLIGV

SEQ ID NO: 9271 - protein, 9 aa, Homo sapiens
SMSRSPPTV

SEQ ID NO: 9272 - protein, 11 aa, Homo sapiens
SMVEDITGLRL

SEQ ID NO: 9273 - protein, 11 aa, Homo sapiens
SMWDDINNVGL

SEQ ID NO: 9274 - protein, 9 aa, Homo sapiens
SQADVIPAV

SEQ ID NO: 9275 - protein, 9 aa, Homo sapiens
SQPDLLHQL

SEQ ID NO: 9276 - protein, 9 aa, Homo sapiens
SQQEIQHIV

SEQ ID NO: 9277 - protein, 11 aa, Homo sapiens
SSSEVISQHLV

SEQ ID NO: 9278 - protein, 11 aa, Homo sapiens
STFDAGAGIAL

SEQ ID NO: 9279 - protein, 10 aa, Homo sapiens
STHGKFHGTV

SEQ ID NO: 9280 - protein, 9 aa, Homo sapiens
SVADLIESM

SEQ ID NO: 9281 - protein, 10 aa, Homo sapiens
SVADLIESML

SEQ ID NO: 9282 - protein, 12 aa, Homo sapiens
SVAGEVVFNTGL

SEQ ID NO: 9283 - protein, 9 aa, Homo sapiens
SVFKLLPQL

SEQ ID NO: 9284 - protein, 11 aa, Homo sapiens
SVFLFNTENKL

SEQ ID NO: 9285 - protein, 9 aa, Homo sapiens
SVLGAITSV

SEQ ID NO: 9286 - protein, 11 aa, Homo sapiens
SVLGDILGSAM

SEQ ID NO: 9287 - protein, 9 aa, Homo sapiens
SVLPKPALV

SEQ ID NO: 9288 - protein, 10 aa, Homo sapiens
SVLSTGVPTV

SEQ ID NO: 9289 - protein, 9 aa, Homo sapiens
SVSGYSPSL

SEQ ID NO: 9290 - protein, 10 aa, Homo sapiens
SVSPVVRVAV

SEQ ID NO: 9291 - protein, 12 aa, Homo sapiens
SVWAAVPGKTFV

SEQ ID NO: 9292 - protein, 9 aa, Homo sapiens
SVWIGGSIL

SEQ ID NO: 9293 - protein, 10 aa, Homo sapiens
SVWIGGSILA

SEQ ID NO: 9294 - protein, 11 aa, Homo sapiens
TIAGGGVIPHI

SEQ ID NO: 9295 - protein, 9 aa, Homo sapiens
TIDDGIFEV

SEQ ID NO: 9296 - protein, 9 aa, Homo sapiens
TIDNGVFEV

SEQ ID NO: 9297 - protein, 9 aa, Homo sapiens
TIEDGIFEV

SEQ ID NO: 9298 - protein, 10 aa, Homo sapiens
TIFTGHTAVV

SEQ ID NO: 9299 - protein, 9 aa, Homo sapiens
TIIEFLSFL

SEQ ID NO: 9300 - protein, 12 aa, Homo sapiens
TIIGSFNGALAA

SEQ ID NO: 9301 - protein, 9 aa, Homo sapiens
TISEGAHHL

SEQ ID NO: 9302 - protein, 10 aa, Homo sapiens
TISQGAIEKV

SEQ ID NO: 9303 - protein, 12 aa, Homo sapiens
TIYGDLKVGDQV

SEQ ID NO: 9304 - protein, 9 aa, Homo sapiens
TLAAEMQEL

SEQ ID NO: 9305 - protein, 11 aa, Homo sapiens
TLAAEMQELRV

SEQ ID NO: 9306 - protein, 10 aa, Homo sapiens
TLADLQLEYL

SEQ ID NO: 9307 - protein, 12 aa, Homo sapiens
TLADLTLAQLLA

SEQ ID NO: 9308 - protein, 9 aa, Homo sapiens
TLAEDLMQL

SEQ ID NO: 9309 - protein, 11 aa, Homo sapiens
TLAEEFTYNPF

SEQ ID NO: 9310 - protein, 8 aa, Homo sapiens
TLAEIAKV

SEQ ID NO: 9311 - protein, 9 aa, Homo sapiens
TLAELDVTL

SEQ ID NO: 9312 - protein, 9 aa, Homo sapiens
TLAELLVLL

SEQ ID NO: 9313 - protein, 11 aa, Homo sapiens
TLAELQPPVQL

SEQ ID NO: 9314 - protein, 9 aa, Homo sapiens
TLAERSAGL

SEQ ID NO: 9315 - protein, 9 aa, Homo sapiens
TLAESALQL

SEQ ID NO: 9316 - protein, 10 aa, Homo sapiens
TLAESALQLL

SEQ ID NO: 9317 - protein, 12 aa, Homo sapiens
TLAESLGGFESL

SEQ ID NO: 9318 - protein, 9 aa, Homo sapiens
TLAESSDHV

SEQ ID NO: 9319 - protein, 9 aa, Homo sapiens
TLAETIQGL

SEQ ID NO: 9320 - protein, 9 aa, Homo sapiens
TLAFAIPMI

SEQ ID NO: 9321 - protein, 11 aa, Homo sapiens
TLAFLIPAVEL

SEQ ID NO: 9322 - protein, 11 aa, Homo sapiens
TLAGKITGMLL

SEQ ID NO: 9323 - protein, 9 aa, Homo sapiens
TLAGLPLLV

SEQ ID NO: 9324 - protein, 11 aa, Homo sapiens
TLAMDTILANA

SEQ ID NO: 9325 - protein, 12 aa, Homo sapiens
TLANGVLASLNL

SEQ ID NO: 9326 - protein, 10 aa, Homo sapiens
TLASDMQWKV

SEQ ID NO: 9327 - protein, 9 aa, Homo sapiens
TLAYLLPAI

SEQ ID NO: 9328 - protein, 10 aa, Homo sapiens
TLAYLLPAIV

SEQ ID NO: 9329 - protein, 9 aa, Homo sapiens
TLDAAISKV

SEQ ID NO: 9330 - protein, 9 aa, Homo sapiens
TLDDIKEWL

SEQ ID NO: 9331 - protein, 8 aa, Homo sapiens
TLDDVQAF

SEQ ID NO: 9332 - protein, 9 aa, Homo sapiens
TLDDVQAFL

SEQ ID NO: 9333 - protein, 9 aa, Homo sapiens
TLDEAFEEL

SEQ ID NO: 9334 - protein, 12 aa, Homo sapiens
TLDEILDETQHL

SEQ ID NO: 9335 - protein, 12 aa, Homo sapiens
TLDELSQGTTTV

SEQ ID NO: 9336 - protein, 9 aa, Homo sapiens
TLDGTISVV

SEQ ID NO: 9337 - protein, 9 aa, Homo sapiens
TLDGVKSWL

SEQ ID NO: 9338 - protein, 9 aa, Homo sapiens
TLDHPIIPA

SEQ ID NO: 9339 - protein, 9 aa, Homo sapiens
TLDLSNNQL

SEQ ID NO: 9340 - protein, 9 aa, Homo sapiens
TLDPAIVSA

SEQ ID NO: 9341 - protein, 11 aa, Homo sapiens
TLDPETGLLFL

SEQ ID NO: 9342 - protein, 10 aa, Homo sapiens
TLDPHNVDYL

SEQ ID NO: 9343 - protein, 9 aa, Homo sapiens
TLDPSLMEM

SEQ ID NO: 9344 - protein, 10 aa, Homo sapiens
TLDSLSIHQL

SEQ ID NO: 9345 - protein, 11 aa, Homo sapiens
TLDSLSIHQLA

SEQ ID NO: 9346 - protein, 9 aa, Homo sapiens
TLDVFNITI

SEQ ID NO: 9347 - protein, 9 aa, Homo sapiens
TLEGTPVFV

SEQ ID NO: 9348 - protein, 11 aa, Homo sapiens
TLFATEDALEV

SEQ ID NO: 9349 - protein, 11 aa, Homo sapiens
TLFATGKWVGV

SEQ ID NO: 9350 - protein, 12 aa, Homo sapiens
TLFDILVAGGML

SEQ ID NO: 9351 - protein, 12 aa, Homo sapiens
TLFGFLGKIDEL

SEQ ID NO: 9352 - protein, 10 aa, Homo sapiens
TLFGGEVCKV

SEQ ID NO: 9353 - protein, 9 aa, Homo sapiens
TLFGMITAV

SEQ ID NO: 9354 - protein, 10 aa, Homo sapiens
TLFSLGLISV

SEQ ID NO: 9355 - protein, 11 aa, Homo sapiens
TLGEIPTYGLA

SEQ ID NO: 9356 - protein, 12 aa, Homo sapiens
TLGFSVEGPSQA

SEQ ID NO: 9357 - protein, 11 aa, Homo sapiens
TLGGLEMELRL

SEQ ID NO: 9358 - protein, 9 aa, Homo sapiens
TLGKDHPAV

SEQ ID NO: 9359 - protein, 10 aa, Homo sapiens
TLGKFTVPML

SEQ ID NO: 9360 - protein, 9 aa, Homo sapiens
TLGQFYQEV

SEQ ID NO: 9361 - protein, 10 aa, Homo sapiens
TLGQFYQEVL

SEQ ID NO: 9362 - protein, 8 aa, Homo sapiens
TLGQIWDV

SEQ ID NO: 9363 - protein, 10 aa, Homo sapiens
TLGSFSGLRV

SEQ ID NO: 9364 - protein, 10 aa, Homo sapiens
TLGVDFIDVA

SEQ ID NO: 9365 - protein, 9 aa, Homo sapiens
TLGVEVHPL

SEQ ID NO: 9366 - protein, 10 aa, Homo sapiens
TLGVEVHPLV

SEQ ID NO: 9367 - protein, 11 aa, Homo sapiens
TLGVKQLIVGV

SEQ ID NO: 9368 - protein, 9 aa, Homo sapiens
TLHRYEHAL

SEQ ID NO: 9369 - protein, 10 aa, Homo sapiens
TLHSRFLEGV

SEQ ID NO: 9370 - protein, 12 aa, Homo sapiens
TLIDPETLLPRL

SEQ ID NO: 9371 - protein, 9 aa, Homo sapiens
TLIEEMLYL

SEQ ID NO: 9372 - protein, 10 aa, Homo sapiens
TLIELWEGLT

SEQ ID NO: 9373 - protein, 11 aa, Homo sapiens
TLIELWEGLTV

SEQ ID NO: 9374 - protein, 12 aa, Homo sapiens
TLIGIPPAPRGV

SEQ ID NO: 9375 - protein, 9 aa, Homo sapiens
TLIGYFVGL

SEQ ID NO: 9376 - protein, 10 aa, Homo sapiens
TLIRVPIPQV

SEQ ID NO: 9377 - protein, 9 aa, Homo sapiens
TLISFIYPA

SEQ ID NO: 9378 - protein, 9 aa, Homo sapiens
TLKEEMESL

SEQ ID NO: 9379 - protein, 12 aa, Homo sapiens
TLKEMIKSGMNV

SEQ ID NO: 9380 - protein, 10 aa, Homo sapiens
TLKESFDGSV

SEQ ID NO: 9381 - protein, 11 aa, Homo sapiens
TLKEVEELEQL

SEQ ID NO: 9382 - protein, 10 aa, Homo sapiens
TLKMSVQPTV

SEQ ID NO: 9383 - protein, 10 aa, Homo sapiens
TLLANGGHGV

SEQ ID NO: 9384 - protein, 9 aa, Homo sapiens
TLLDAELFL

SEQ ID NO: 9385 - protein, 9 aa, Homo sapiens
TLLDALYEI

SEQ ID NO: 9386 - protein, 9 aa, Homo sapiens
TLLDSTWNL

SEQ ID NO: 9387 - protein, 9 aa, Homo sapiens
TLLEDAIEV

SEQ ID NO: 9388 - protein, 9 aa, Homo sapiens
TLLEEVQEL

SEQ ID NO: 9389 - protein, 11 aa, Homo sapiens
TLLEISDLNEL

SEQ ID NO: 9390 - protein, 12 aa, Homo sapiens
TLLEISDLNELL

SEQ ID NO: 9391 - protein, 8 aa, Homo sapiens
TLLEKDYF

SEQ ID NO: 9392 - protein, 10 aa, Homo sapiens
TLLEVGQIAV

SEQ ID NO: 9393 - protein, 9 aa, Homo sapiens
TLLGFDDFV

SEQ ID NO: 9394 - protein, 11 aa, Homo sapiens
TLLGFDDFVNM

SEQ ID NO: 9395 - protein, 12 aa, Homo sapiens
TLLGFDDFVNMV

SEQ ID NO: 9396 - protein, 9 aa, Homo sapiens
TLLIKTVET

SEQ ID NO: 9397 - protein, 9 aa, Homo sapiens
TLLNSEVHM

SEQ ID NO: 9398 - protein, 11 aa, Homo sapiens
TLLNSEVHMLL

SEQ ID NO: 9399 - protein, 10 aa, Homo sapiens
TLLPDLIQKV

SEQ ID NO: 9400 - protein, 12 aa, Homo sapiens
TLLPDLIQKVLT

SEQ ID NO: 9401 - protein, 9 aa, Homo sapiens
TLLSEIAEL

SEQ ID NO: 9402 - protein, 11 aa, Homo sapiens
TLLSEIAELEL

SEQ ID NO: 9403 - protein, 9 aa, Homo sapiens
TLLSNLEEA

SEQ ID NO: 9404 - protein, 10 aa, Homo sapiens
TLLTLTGNYL

SEQ ID NO: 9405 - protein, 9 aa, Homo sapiens
TLMDLSTKA

SEQ ID NO: 9406 - protein, 12 aa, Homo sapiens
TLMDLSTKAFAM

SEQ ID NO: 9407 - protein, 10 aa, Homo sapiens
TLMEDVENSF

SEQ ID NO: 9408 - protein, 11 aa, Homo sapiens
TLMEDVENSFF

SEQ ID NO: 9409 - protein, 12 aa, Homo sapiens
TLMEDVENSFFL

SEQ ID NO: 9410 - protein, 10 aa, Homo sapiens
TLMEQTLPVT

SEQ ID NO: 9411 - protein, 11 aa, Homo sapiens
TLMEQTLPVTV

SEQ ID NO: 9412 - protein, 9 aa, Homo sapiens
TLMNTIMQL

SEQ ID NO: 9413 - protein, 9 aa, Homo sapiens
TLNAHEHFV

SEQ ID NO: 9414 - protein, 12 aa, Homo sapiens
TLNDELEIIEGM

SEQ ID NO: 9415 - protein, 10 aa, Homo sapiens
TLNDGAAALV

SEQ ID NO: 9416 - protein, 11 aa, Homo sapiens
TLNDGAAALVL

SEQ ID NO: 9417 - protein, 12 aa, Homo sapiens
TLNDGAAALVLM

SEQ ID NO: 9418 - protein, 10 aa, Homo sapiens
TLNDGVVVQV

SEQ ID NO: 9419 - protein, 10 aa, Homo sapiens
TLNDREYQLL

SEQ ID NO: 9420 - protein, 9 aa, Homo sapiens
TLNEALEFA

SEQ ID NO: 9421 - protein, 9 aa, Homo sapiens
TLNKFIEEL

SEQ ID NO: 9422 - protein, 9 aa, Homo sapiens
TLNMKTVYV

SEQ ID NO: 9423 - protein, 9 aa, Homo sapiens
TLPVDFVTA

SEQ ID NO: 9424 - protein, 11 aa, Homo sapiens
TLQEAEAFVGA

SEQ ID NO: 9425 - protein, 9 aa, Homo sapiens
TLQEFLKLA

SEQ ID NO: 9426 - protein, 9 aa, Homo sapiens
TLQEVFEKA

SEQ ID NO: 9427 - protein, 11 aa, Homo sapiens
TLQEVTEMDSV

SEQ ID NO: 9428 - protein, 9 aa, Homo sapiens
TLQEWLTEV

SEQ ID NO: 9429 - protein, 9 aa, Homo sapiens
TLQGNTREV

SEQ ID NO: 9430 - protein, 9 aa, Homo sapiens
TLQHAEIFL

SEQ ID NO: 9431 - protein, 9 aa, Homo sapiens
TLQIFNIEM

SEQ ID NO: 9432 - protein, 9 aa, Homo sapiens
TLQKPSPEL

SEQ ID NO: 9433 - protein, 9 aa, Homo sapiens
TLQSEVKPI

SEQ ID NO: 9434 - protein, 10 aa, Homo sapiens
TLQSEVKPIL

SEQ ID NO: 9435 - protein, 9 aa, Homo sapiens
TLSDFLTEI

SEQ ID NO: 9436 - protein, 9 aa, Homo sapiens
TLSDVVVGL

SEQ ID NO: 9437 - protein, 11 aa, Homo sapiens
TLSEDSPYETL

SEQ ID NO: 9438 - protein, 9 aa, Homo sapiens
TLSELKTVL

SEQ ID NO: 9439 - protein, 11 aa, Homo sapiens
TLSMSADVPLV

SEQ ID NO: 9440 - protein, 9 aa, Homo sapiens
TLSNAEFQM

SEQ ID NO: 9441 - protein, 9 aa, Homo sapiens
TLSNKSYSV

SEQ ID NO: 9442 - protein, 9 aa, Homo sapiens
TLSPEMITV

SEQ ID NO: 9443 - protein, 12 aa, Homo sapiens
TLSYLLPAIVHI

SEQ ID NO: 9444 - protein, 8 aa, Homo sapiens
TLTGVHQV

SEQ ID NO: 9445 - protein, 9 aa, Homo sapiens
TLTQVSPQM

SEQ ID NO: 9446 - protein, 9 aa, Homo sapiens
TLTRAVTTV

SEQ ID NO: 9447 - protein, 9 aa, Homo sapiens
TLWNGQKLV

SEQ ID NO: 9448 - protein, 11 aa, Homo sapiens
TLWNGQKLVTT

SEQ ID NO: 9449 - protein, 11 aa, Homo sapiens
TLYANGSRTET

SEQ ID NO: 9450 - protein, 10 aa, Homo sapiens
TLYDIAHTPG

SEQ ID NO: 9451 - protein, 12 aa, Homo sapiens
TLYDIAHTPGVA

SEQ ID NO: 9452 - protein, 10 aa, Homo sapiens
TLYEVKSENL

SEQ ID NO: 9453 - protein, 9 aa, Homo sapiens
TLYNNTIKV

SEQ ID NO: 9454 - protein, 9 aa, Homo sapiens
TLYSGLDEV

SEQ ID NO: 9455 - protein, 11 aa, Homo sapiens
TLYTYPENWRA

SEQ ID NO: 9456 - protein, 9 aa, Homo sapiens
TMDGANVEM

SEQ ID NO: 9457 - protein, 9 aa, Homo sapiens
TMGEGPDKA

SEQ ID NO: 9458 - protein, 12 aa, Homo sapiens
TMHDVDAESFEV

SEQ ID NO: 9459 - protein, 9 aa, Homo sapiens
TMIKGLYGI

SEQ ID NO: 9460 - protein, 11 aa, Homo sapiens
TMLDVEGLFYL

SEQ ID NO: 9461 - protein, 10 aa, Homo sapiens
TMLFLGLHNV

SEQ ID NO: 9462 - protein, 10 aa, Homo sapiens
TMQELIGLYV

SEQ ID NO: 9463 - protein, 9 aa, Homo sapiens
TTPEEIAQV

SEQ ID NO: 9464 - protein, 11 aa, Homo sapiens
TVAEINATMSV

SEQ ID NO: 9465 - protein, 10 aa, Homo sapiens
TVDDPYATFV

SEQ ID NO: 9466 - protein, 9 aa, Homo sapiens
TVDISPDTV

SEQ ID NO: 9467 - protein, 9 aa, Homo sapiens
TVIGELPPA

SEQ ID NO: 9468 - protein, 10 aa, Homo sapiens
TVIHFNNPKV

SEQ ID NO: 9469 - protein, 10 aa, Homo sapiens
TVLKAQFPSV

SEQ ID NO: 9470 - protein, 10 aa, Homo sapiens
TVMGAEIRHV

SEQ ID NO: 9471 - protein, 12 aa, Homo sapiens
TVMGAEIRHVLV

SEQ ID NO: 9472 - protein, 10 aa, Homo sapiens
TVMGAELRHV

SEQ ID NO: 9473 - protein, 9 aa, Homo sapiens
TVSEAPPLL

SEQ ID NO: 9474 - protein, 9 aa, Homo sapiens
TVTNAVVTV

SEQ ID NO: 9475 - protein, 9 aa, Homo sapiens
TVYGGLMYI

SEQ ID NO: 9476 - protein, 9 aa, Homo sapiens
TVYGGVMYI

SEQ ID NO: 9477 - protein, 9 aa, Homo sapiens
VAYKNVVGA

SEQ ID NO: 9478 - protein, 10 aa, Homo sapiens
VIDPATATSV

SEQ ID NO: 9479 - protein, 12 aa, Homo sapiens
VIHDNFGIVEGL

SEQ ID NO: 9480 - protein, 12 aa, Homo sapiens
VIIEQSWGSPKV

SEQ ID NO: 9481 - protein, 11 aa, Homo sapiens
VILKILPTLEA

SEQ ID NO: 9482 - protein, 10 aa, Homo sapiens
VILPVPAFNV

SEQ ID NO: 9483 - protein, 10 aa, Homo sapiens
VILTGTPPGV

SEQ ID NO: 9484 - protein, 11 aa, Homo sapiens
VIMFLGDGMGV

SEQ ID NO: 9485 - protein, 11 aa, Homo sapiens
VIMSIEEKMEA

SEQ ID NO: 9486 - protein, 9 aa, Homo sapiens
VINGNPITI

SEQ ID NO: 9487 - protein, 9 aa, Homo sapiens
VIWGTDVNV

SEQ ID NO: 9488 - protein, 9 aa, Homo sapiens
VLAAVYKAL

SEQ ID NO: 9489 - protein, 11 aa, Homo sapiens
VLADHARTITV

SEQ ID NO: 9490 - protein, 11 aa, Homo sapiens
VLADLGSKTLT

SEQ ID NO: 9491 - protein, 9 aa, Homo sapiens
VLAEEPEAV

SEQ ID NO: 9492 - protein, 12 aa, Homo sapiens
VLAEFDTPGHTL

SEQ ID NO: 9493 - protein, 9 aa, Homo sapiens
VLAGDVTDV

SEQ ID NO: 9494 - protein, 11 aa, Homo sapiens
VLAGDVTDVLL

SEQ ID NO: 9495 - protein, 12 aa, Homo sapiens
VLAGDVTDVLLL

SEQ ID NO: 9496 - protein, 9 aa, Homo sapiens
VLANVTHLL

SEQ ID NO: 9497 - protein, 9 aa, Homo sapiens
VLAPGPPQA

SEQ ID NO: 9498 - protein, 9 aa, Homo sapiens
VLAPLIALV

SEQ ID NO: 9499 - protein, 12 aa, Homo sapiens
VLAPMPLAEVEL

SEQ ID NO: 9500 - protein, 9 aa, Homo sapiens
VLAPPPEEV

SEQ ID NO: 9501 - protein, 9 aa, Homo sapiens
VLATVTKPV

SEQ ID NO: 9502 - protein, 12 aa, Homo sapiens
VLAYEPVWAIGT

SEQ ID NO: 9503 - protein, 10 aa, Homo sapiens
VLCNSEDIRL

SEQ ID NO: 9504 - protein, 11 aa, Homo sapiens
VLDDIQDLIYF

SEQ ID NO: 9505 - protein, 8 aa, Homo sapiens
VLDDKDYF

SEQ ID NO: 9506 - protein, 9 aa, Homo sapiens
VLDEADEML

SEQ ID NO: 9507 - protein, 9 aa, Homo sapiens
VLDEAGSTV

SEQ ID NO: 9508 - protein, 9 aa, Homo sapiens
VLDEGKMKL

SEQ ID NO: 9509 - protein, 9 aa, Homo sapiens
VLDEGKVNM

SEQ ID NO: 9510 - protein, 9 aa, Homo sapiens
VLDEGLTSV

SEQ ID NO: 9511 - protein, 9 aa, Homo sapiens
VLDEGSASV

SEQ ID NO: 9512 - protein, 9 aa, Homo sapiens
VLDELDMEL

SEQ ID NO: 9513 - protein, 9 aa, Homo sapiens
VLDEVDQML

SEQ ID NO: 9514 - protein, 10 aa, Homo sapiens
VLDFEHFLPM

SEQ ID NO: 9515 - protein, 9 aa, Homo sapiens
VLDGADCIM

SEQ ID NO: 9516 - protein, 9 aa, Homo sapiens
VLDGVLMEL

SEQ ID NO: 9517 - protein, 9 aa, Homo sapiens
VLDLDFPAL

SEQ ID NO: 9518 - protein, 9 aa, Homo sapiens
VLDLLTSYL

SEQ ID NO: 9519 - protein, 9 aa, Homo sapiens
VLDLRAFYA

SEQ ID NO: 9520 - protein, 9 aa, Homo sapiens
VLDNLLAFV

SEQ ID NO: 9521 - protein, 8 aa, Homo sapiens
VLDNPYPV

SEQ ID NO: 9522 - protein, 9 aa, Homo sapiens
VLDPESVEL

SEQ ID NO: 9523 - protein, 11 aa, Homo sapiens
VLDPNMDLRTV

SEQ ID NO: 9524 - protein, 12 aa, Homo sapiens
VLDPSGSMNIYL

SEQ ID NO: 9525 - protein, 11 aa, Homo sapiens
VLDPSMVILEV

SEQ ID NO: 9526 - protein, 12 aa, Homo sapiens
VLDSGAPIKIPV

SEQ ID NO: 9527 - protein, 9 aa, Homo sapiens
VLDTNDRFL

SEQ ID NO: 9528 - protein, 9 aa, Homo sapiens
VLDVDLQGV

SEQ ID NO: 9529 - protein, 11 aa, Homo sapiens
VLDVESGNISV

SEQ ID NO: 9530 - protein, 10 aa, Homo sapiens
VLEDGPWKTV

SEQ ID NO: 9531 - protein, 11 aa, Homo sapiens
VLEDVTGEEFV

SEQ ID NO: 9532 - protein, 12 aa, Homo sapiens
VLEDVTGEEFVL

SEQ ID NO: 9533 - protein, 9 aa, Homo sapiens
VLEEFVPEI

SEQ ID NO: 9534 - protein, 9 aa, Homo sapiens
VLEKLGVTV

SEQ ID NO: 9535 - protein, 9 aa, Homo sapiens
VLEKSLLNV

SEQ ID NO: 9536 - protein, 10 aa, Homo sapiens
VLFAVNNMFV

SEQ ID NO: 9537 - protein, 8 aa, Homo sapiens
VLFEDVYE

SEQ ID NO: 9538 - protein, 9 aa, Homo sapiens
VLFEDVYEL

SEQ ID NO: 9539 - protein, 12 aa, Homo sapiens
VLFEHAVGYALL

SEQ ID NO: 9540 - protein, 9 aa, Homo sapiens
VLFENTDSV

SEQ ID NO: 9541 - protein, 11 aa, Homo sapiens
VLFEYIPQNED

SEQ ID NO: 9542 - protein, 9 aa, Homo sapiens
VLFLGELYL

SEQ ID NO: 9543 - protein, 9 aa, Homo sapiens
VLFLKPSTA

SEQ ID NO: 9544 - protein, 11 aa, Homo sapiens
VLFNVNSDTRL

SEQ ID NO: 9545 - protein, 10 aa, Homo sapiens
VLFSSPPVIL

SEQ ID NO: 9546 - protein, 12 aa, Homo sapiens
VLFTDEGVPKFL

SEQ ID NO: 9547 - protein, 8 aa, Homo sapiens
VLGAITSV

SEQ ID NO: 9548 - protein, 9 aa, Homo sapiens
VLGEGVPIL

SEQ ID NO: 9549 - protein, 12 aa, Homo sapiens
VLGEHGDSSVPV

SEQ ID NO: 9550 - protein, 11 aa, Homo sapiens
VLGETQDFHSL

SEQ ID NO: 9551 - protein, 11 aa, Homo sapiens
VLGEVGSGFKV

SEQ ID NO: 9552 - protein, 8 aa, Homo sapiens
VLGFVKVA

SEQ ID NO: 9553 - protein, 9 aa, Homo sapiens
VLGLDLWQV

SEQ ID NO: 9554 - protein, 9 aa, Homo sapiens
VLGRTIWGV

SEQ ID NO: 9555 - protein, 11 aa, Homo sapiens
VLGTVGFGSGL

SEQ ID NO: 9556 - protein, 9 aa, Homo sapiens
VLHDISSLL

SEQ ID NO: 9557 - protein, 10 aa, Homo sapiens
VLHDISSLLS

SEQ ID NO: 9558 - protein, 9 aa, Homo sapiens
VLHEKTPVS

SEQ ID NO: 9559 - protein, 9 aa, Homo sapiens
VLHNGPEEV

SEQ ID NO: 9560 - protein, 10 aa, Homo sapiens
VLIDIREYWM

SEQ ID NO: 9561 - protein, 9 aa, Homo sapiens
VLIGSNHSL

SEQ ID NO: 9562 - protein, 11 aa, Homo sapiens
VLIIGELLKQA

SEQ ID NO: 9563 - protein, 10 aa, Homo sapiens
VLIMELINNV

SEQ ID NO: 9564 - protein, 11 aa, Homo sapiens
VLISLKQAPLV

SEQ ID NO: 9565 - protein, 9 aa, Homo sapiens
VLKAQFPSV

SEQ ID NO: 9566 - protein, 9 aa, Homo sapiens
VLKDYIAYA

SEQ ID NO: 9567 - protein, 10 aa, Homo sapiens
VLKEEASDYL

SEQ ID NO: 9568 - protein, 12 aa, Homo sapiens
VLKEEASDYLEL

SEQ ID NO: 9569 - protein, 9 aa, Homo sapiens
VLKEYLDNV

SEQ ID NO: 9570 - protein, 9 aa, Homo sapiens
VLLDEDDDL

SEQ ID NO: 9571 - protein, 10 aa, Homo sapiens
VLLDGETFEV

SEQ ID NO: 9572 - protein, 9 aa, Homo sapiens
VLLDLISEV

SEQ ID NO: 9573 - protein, 9 aa, Homo sapiens
VLLDPPLIA

SEQ ID NO: 9574 - protein, 10 aa, Homo sapiens
VLLDPPLIAL

SEQ ID NO: 9575 - protein, 10 aa, Homo sapiens
VLLEDLASQV

SEQ ID NO: 9576 - protein, 12 aa, Homo sapiens
VLLEDLASQVGL

SEQ ID NO: 9577 - protein, 11 aa, Homo sapiens
VLLEDVDAAFL

SEQ ID NO: 9578 - protein, 9 aa, Homo sapiens
VLLEEPVVL

SEQ ID NO: 9579 - protein, 10 aa, Homo sapiens
VLLEEPVVLA

SEQ ID NO: 9580 - protein, 10 aa, Homo sapiens
VLLEIEDLQV

SEQ ID NO: 9581 - protein, 9 aa, Homo sapiens
VLLFETALL

SEQ ID NO: 9582 - protein, 8 aa, Homo sapiens
VLLGKVYV

SEQ ID NO: 9583 - protein, 12 aa, Homo sapiens
VLLGQDEPLIHV

SEQ ID NO: 9584 - protein, 11 aa, Homo sapiens
VLLLDVTPLSL

SEQ ID NO: 9585 - protein, 11 aa, Homo sapiens
VLLPEYGGTKV

SEQ ID NO: 9586 - protein, 12 aa, Homo sapiens
VLLSPLSVATAL

SEQ ID NO: 9587 - protein, 12 aa, Homo sapiens
VLLTLQKPSPEL

SEQ ID NO: 9588 - protein, 9 aa, Homo sapiens
VLLTQLIKA

SEQ ID NO: 9589 - protein, 11 aa, Homo sapiens
VLMDIQASTVV

SEQ ID NO: 9590 - protein, 12 aa, Homo sapiens
VLMDLKALLLEA

SEQ ID NO: 9591 - protein, 12 aa, Homo sapiens
VLMDVTGGPFDL

SEQ ID NO: 9592 - protein, 9 aa, Homo sapiens
VLMEHGVPV

SEQ ID NO: 9593 - protein, 9 aa, Homo sapiens
VLMEIIAKV

SEQ ID NO: 9594 - protein, 10 aa, Homo sapiens
VLMNEILHGA

SEQ ID NO: 9595 - protein, 10 aa, Homo sapiens
VLMNPNIASV

SEQ ID NO: 9596 - protein, 12 aa, Homo sapiens
VLMNPNIASVQT

SEQ ID NO: 9597 - protein, 11 aa, Homo sapiens
VLMNQPPQIAP

SEQ ID NO: 9598 - protein, 12 aa, Homo sapiens
VLMRANIQAVSL

SEQ ID NO: 9599 - protein, 11 aa, Homo sapiens
VLMTADAAKRL

SEQ ID NO: 9600 - protein, 10 aa, Homo sapiens
VLMTQQPRPV

SEQ ID NO: 9601 - protein, 9 aa, Homo sapiens
VLMVEVENV

SEQ ID NO: 9602 - protein, 9 aa, Homo sapiens
VLNNMEIGT

SEQ ID NO: 9603 - protein, 9 aa, Homo sapiens
VLPGLIHKV

SEQ ID NO: 9604 - protein, 9 aa, Homo sapiens
VLPLTVAEV

SEQ ID NO: 9605 - protein, 9 aa, Homo sapiens
VLPPPPPHA

SEQ ID NO: 9606 - protein, 9 aa, Homo sapiens
VLPSFTPYV

SEQ ID NO: 9607 - protein, 8 aa, Homo sapiens
VLQATVVA

SEQ ID NO: 9608 - protein, 9 aa, Homo sapiens
VLQATVVAV

SEQ ID NO: 9609 - protein, 9 aa, Homo sapiens
VLQEAPWEV

SEQ ID NO: 9610 - protein, 10 aa, Homo sapiens
VLQGDLVMNV

SEQ ID NO: 9611 - protein, 9 aa, Homo sapiens
VLQGELEAV

SEQ ID NO: 9612 - protein, 9 aa, Homo sapiens
VLQPAPHQV

SEQ ID NO: 9613 - protein, 11 aa, Homo sapiens
VLQPLIAEHQA

SEQ ID NO: 9614 - protein, 9 aa, Homo sapiens
VLQVLLSQV

SEQ ID NO: 9615 - protein, 10 aa, Homo sapiens
VLQVVNLPIV

SEQ ID NO: 9616 - protein, 10 aa, Homo sapiens
VLRYQDTPGV

SEQ ID NO: 9617 - protein, 9 aa, Homo sapiens
VLSDSRPAM

SEQ ID NO: 9618 - protein, 10 aa, Homo sapiens
VLSEFELRLL

SEQ ID NO: 9619 - protein, 9 aa, Homo sapiens
VLSEPVLFL

SEQ ID NO: 9620 - protein, 11 aa, Homo sapiens
VLSIGDGIARV

SEQ ID NO: 9621 - protein, 10 aa, Homo sapiens
VLSSLTPAKV

SEQ ID NO: 9622 - protein, 9 aa, Homo sapiens
VLSTGVPTV

SEQ ID NO: 9623 - protein, 9 aa, Homo sapiens
VLTDTTAEL

SEQ ID NO: 9624 - protein, 11 aa, Homo sapiens
VLTEHVAAAEL

SEQ ID NO: 9625 - protein, 11 aa, Homo sapiens
VLTEKITPLEI

SEQ ID NO: 9626 - protein, 9 aa, Homo sapiens
VLTGHNHYV

SEQ ID NO: 9627 - protein, 11 aa, Homo sapiens
VLTSVNLFIGI

SEQ ID NO: 9628 - protein, 11 aa, Homo sapiens
VLVDEDGPATV

SEQ ID NO: 9629 - protein, 12 aa, Homo sapiens
VLVDIKDTEPLI

SEQ ID NO: 9630 - protein, 12 aa, Homo sapiens
VLVGGSTRIPKV

SEQ ID NO: 9631 - protein, 9 aa, Homo sapiens
VLVPTVSMV

SEQ ID NO: 9632 - protein, 11 aa, Homo sapiens
VLVSGLRGLGV

SEQ ID NO: 9633 - protein, 9 aa, Homo sapiens
VLWGALYPL

SEQ ID NO: 9634 - protein, 10 aa, Homo sapiens
VLWGALYPLL

SEQ ID NO: 9635 - protein, 9 aa, Homo sapiens
VLWNKTVTA

SEQ ID NO: 9636 - protein, 9 aa, Homo sapiens
VLWRGETAV

SEQ ID NO: 9637 - protein, 9 aa, Homo sapiens
VLWTGPKVV

SEQ ID NO: 9638 - protein, 11 aa, Homo sapiens
VLYEDSLSSQV

SEQ ID NO: 9639 - protein, 9 aa, Homo sapiens
VLYEMLYGL

SEQ ID NO: 9640 - protein, 9 aa, Homo sapiens
VLYGDVEEL

SEQ ID NO: 9641 - protein, 12 aa, Homo sapiens
VMDSGDGVTHTV

SEQ ID NO: 9642 - protein, 9 aa, Homo sapiens
VMDTHLVNI

SEQ ID NO: 9643 - protein, 10 aa, Homo sapiens
VMFDDAIERA

SEQ ID NO: 9644 - protein, 12 aa, Homo sapiens
VMISTEWAAPNV

SEQ ID NO: 9645 - protein, 9 aa, Homo sapiens
VMKFSVSPV

SEQ ID NO: 9646 - protein, 12 aa, Homo sapiens
VMLAVDAVIAEL

SEQ ID NO: 9647 - protein, 9 aa, Homo sapiens
VMLGETNPA

SEQ ID NO: 9648 - protein, 9 aa, Homo sapiens
VMMETENRL

SEQ ID NO: 9649 - protein, 9 aa, Homo sapiens
VMQPHVPHA

SEQ ID NO: 9650 - protein, 8 aa, Homo sapiens
VQAPDWHL

SEQ ID NO: 9651 - protein, 10 aa, Homo sapiens
VQFELHYQEV

SEQ ID NO: 9652 - protein, 11 aa, Homo sapiens
VQPEATQVPLV

SEQ ID NO: 9653 - protein, 9 aa, Homo sapiens
VSTPTLVEV

SEQ ID NO: 9654 - protein, 10 aa, Homo sapiens
VTLNVLADSV

SEQ ID NO: 9655 - protein, 11 aa, Homo sapiens
VVADTPELQRI

SEQ ID NO: 9656 - protein, 11 aa, Homo sapiens
VVAMVWEGLNV

SEQ ID NO: 9657 - protein, 12 aa, Homo sapiens
VVAMVWEGLNVV

SEQ ID NO: 9658 - protein, 9 aa, Homo sapiens
VVDEGPTGV

SEQ ID NO: 9659 - protein, 12 aa, Homo sapiens
VVIAHDVDPIEL

SEQ ID NO: 9660 - protein, 10 aa, Homo sapiens
VVLDDKDYFL

SEQ ID NO: 9661 - protein, 9 aa, Homo sapiens
VVMGTVPRL

SEQ ID NO: 9662 - protein, 9 aa, Homo sapiens
VVYGEPITA

SEQ ID NO: 9663 - protein, 10 aa, Homo sapiens
WLDEHTLVTT

SEQ ID NO: 9664 - protein, 10 aa, Homo sapiens
WLNENAVEKV

SEQ ID NO: 9665 - protein, 10 aa, Homo sapiens
WLQDVFNVPL

SEQ ID NO: 9666 - protein, 12 aa, Homo sapiens
WLYNESPVRGTV

SEQ ID NO: 9667 - protein, 10 aa, Homo sapiens
WMDVGQGPGL

SEQ ID NO: 9668 - protein, 9 aa, Homo sapiens
YADKDVFHM

SEQ ID NO: 9669 - protein, 9 aa, Homo sapiens
YAFPKSITV

SEQ ID NO: 9670 - protein, 11 aa, Homo sapiens
YAGGTASATKV

SEQ ID NO: 9671 - protein, 11 aa, Homo sapiens
YGIENEVFLSL

SEQ ID NO: 9672 - protein, 11 aa, Homo sapiens
YGIKDDVFLSV

SEQ ID NO: 9673 - protein, 9 aa, Homo sapiens
YGLSWNPNL

SEQ ID NO: 9674 - protein, 9 aa, Homo sapiens
YGPPSTWSV

SEQ ID NO: 9675 - protein, 9 aa, Homo sapiens
YIAGHPAFV

SEQ ID NO: 9676 - protein, 9 aa, Homo sapiens
YIDKQPEEA

SEQ ID NO: 9677 - protein, 9 aa, Homo sapiens
YIDTNALRV

SEQ ID NO: 9678 - protein, 9 aa, Homo sapiens
YIGPDTPAL

SEQ ID NO: 9679 - protein, 9 aa, Homo sapiens
YIGPVLVSV

SEQ ID NO: 9680 - protein, 9 aa, Homo sapiens
YIGSVVISV

SEQ ID NO: 9681 - protein, 9 aa, Homo sapiens
YIHNILYEV

SEQ ID NO: 9682 - protein, 9 aa, Homo sapiens
YIKDGITRV

SEQ ID NO: 9683 - protein, 8 aa, Homo sapiens
YILDLQVV

SEQ ID NO: 9684 - protein, 9 aa, Homo sapiens
YILDLQVVL

SEQ ID NO: 9685 - protein, 11 aa, Homo sapiens
YILPQVSFTAV

SEQ ID NO: 9686 - protein, 12 aa, Homo sapiens
YILPTLEKELFL

SEQ ID NO: 9687 - protein, 9 aa, Homo sapiens
YILRELPKV

SEQ ID NO: 9688 - protein, 9 aa, Homo sapiens
YIQENLELV

SEQ ID NO: 9689 - protein, 10 aa, Homo sapiens
YISPDQLADL

SEQ ID NO: 9690 - protein, 9 aa, Homo sapiens
YITPFIRPV

SEQ ID NO: 9691 - protein, 9 aa, Homo sapiens
YIYDLLEEV

SEQ ID NO: 9692 - protein, 11 aa, Homo sapiens
YLAAVDKWLGV

SEQ ID NO: 9693 - protein, 9 aa, Homo sapiens
YLAAVLEYL

SEQ ID NO: 9694 - protein, 12 aa, Homo sapiens
YLADPMKARVVL

SEQ ID NO: 9695 - protein, 11 aa, Homo sapiens
YLADSTLSEEM

SEQ ID NO: 9696 - protein, 10 aa, Homo sapiens
YLADVVDSEA

SEQ ID NO: 9697 - protein, 11 aa, Homo sapiens
YLAEARNLPPL

SEQ ID NO: 9698 - protein, 12 aa, Homo sapiens
YLAEARNLPPLT

SEQ ID NO: 9699 - protein, 10 aa, Homo sapiens
YLAEDSNMSV

SEQ ID NO: 9700 - protein, 10 aa, Homo sapiens
YLAEFFVNEA

SEQ ID NO: 9701 - protein, 9 aa, Homo sapiens
YLAEKYEWD

SEQ ID NO: 9702 - protein, 11 aa, Homo sapiens
YLAEKYEWDVA

SEQ ID NO: 9703 - protein, 9 aa, Homo sapiens
YLAKLIFQM

SEQ ID NO: 9704 - protein, 12 aa, Homo sapiens
YLANLTQSQIAL

SEQ ID NO: 9705 - protein, 12 aa, Homo sapiens
YLAPENGYLMEA

SEQ ID NO: 9706 - protein, 9 aa, Homo sapiens
YLAPFDWKI

SEQ ID NO: 9707 - protein, 11 aa, Homo sapiens
YLAPHPFPHPA

SEQ ID NO: 9708 - protein, 11 aa, Homo sapiens
YLAPKIEDEEG

SEQ ID NO: 9709 - protein, 12 aa, Homo sapiens
YLAPKIEDEEGS

SEQ ID NO: 9710 - protein, 11 aa, Homo sapiens
YLAPSGPSGTL

SEQ ID NO: 9711 - protein, 9 aa, Homo sapiens
YLASPPLVI

SEQ ID NO: 9712 - protein, 12 aa, Homo sapiens
YLASPPLVIAYA

SEQ ID NO: 9713 - protein, 8 aa, Homo sapiens
YLASVFHA

SEQ ID NO: 9714 - protein, 9 aa, Homo sapiens
YLASVFHAT

SEQ ID NO: 9715 - protein, 11 aa, Homo sapiens
YLASVKAMHEA

SEQ ID NO: 9716 - protein, 9 aa, Homo sapiens
YLDDLLPKL

SEQ ID NO: 9717 - protein, 9 aa, Homo sapiens
YLDDLNEGV

SEQ ID NO: 9718 - protein, 10 aa, Homo sapiens
YLDDVSLHHL

SEQ ID NO: 9719 - protein, 12 aa, Homo sapiens
YLDDYGETDQGL

SEQ ID NO: 9720 - protein, 11 aa, Homo sapiens
YLDEAASAPAI

SEQ ID NO: 9721 - protein, 9 aa, Homo sapiens
YLDEDTIYH

SEQ ID NO: 9722 - protein, 8 aa, Homo sapiens
YLDEELMV

SEQ ID NO: 9723 - protein, 9 aa, Homo sapiens
YLDEELMVL

SEQ ID NO: 9724 - protein, 11 aa, Homo sapiens
YLDEIVKEVEA

SEQ ID NO: 9725 - protein, 9 aa, Homo sapiens
YLDENEKVV

SEQ ID NO: 9726 - protein, 10 aa, Homo sapiens
YLDENEKVVL

SEQ ID NO: 9727 - protein, 9 aa, Homo sapiens
YLDEPTVNT

SEQ ID NO: 9728 - protein, 9 aa, Homo sapiens
YLDEQIKKV

SEQ ID NO: 9729 - protein, 9 aa, Homo sapiens
YLDFINHYA

SEQ ID NO: 9730 - protein, 9 aa, Homo sapiens
YLDHAGATL

SEQ ID NO: 9731 - protein, 9 aa, Homo sapiens
YLDIDKGHV

SEQ ID NO: 9732 - protein, 10 aa, Homo sapiens
YLDINALQEL

SEQ ID NO: 9733 - protein, 9 aa, Homo sapiens
YLDIVKLLL

SEQ ID NO: 9734 - protein, 10 aa, Homo sapiens
YLDKPEEWHT

SEQ ID NO: 9735 - protein, 9 aa, Homo sapiens
YLDLFGDPS

SEQ ID NO: 9736 - protein, 11 aa, Homo sapiens
YLDLFGDPSVT

SEQ ID NO: 9737 - protein, 12 aa, Homo sapiens
YLDLFGDPSVTG

SEQ ID NO: 9738 - protein, 9 aa, Homo sapiens
YLDNGNNKM

SEQ ID NO: 9739 - protein, 9 aa, Homo sapiens
YLDNLVKHL

SEQ ID NO: 9740 - protein, 9 aa, Homo sapiens
YLDPRITVA

SEQ ID NO: 9741 - protein, 10 aa, Homo sapiens
YLDQISRYYI

SEQ ID NO: 9742 - protein, 9 aa, Homo sapiens
YLDQLNHIL

SEQ ID NO: 9743 - protein, 12 aa, Homo sapiens
YLDQTVVPILLQ

SEQ ID NO: 9744 - protein, 9 aa, Homo sapiens
YLDSEQRLM

SEQ ID NO: 9745 - protein, 9 aa, Homo sapiens
YLDVGLWHL

SEQ ID NO: 9746 - protein, 9 aa, Homo sapiens
YLEAGGTKV

SEQ ID NO: 9747 - protein, 11 aa, Homo sapiens
YLEDKPSPPPV

SEQ ID NO: 9748 - protein, 9 aa, Homo sapiens
YLEDKVYLT

SEQ ID NO: 9749 - protein, 11 aa, Homo sapiens
YLEDTKEKVSI

SEQ ID NO: 9750 - protein, 8 aa, Homo sapiens
YLEDVRLV

SEQ ID NO: 9751 - protein, 9 aa, Homo sapiens
YLEEDVYQL

SEQ ID NO: 9752 - protein, 12 aa, Homo sapiens
YLEEDVYQLQEL

SEQ ID NO: 9753 - protein, 11 aa, Homo sapiens
YLELDTIKNLV

SEQ ID NO: 9754 - protein, 10 aa, Homo sapiens
YLELFGDPSV

SEQ ID NO: 9755 - protein, 10 aa, Homo sapiens
YLENGTPDTA

SEQ ID NO: 9756 - protein, 9 aa, Homo sapiens
YLENMVIKL

SEQ ID NO: 9757 - protein, 10 aa, Homo sapiens
YLENYDAIRV

SEQ ID NO: 9758 - protein, 9 aa, Homo sapiens
YLESNGIKV

SEQ ID NO: 9759 - protein, 10 aa, Homo sapiens
YLFDDPLSAV

SEQ ID NO: 9760 - protein, 12 aa, Homo sapiens
YLFDEIDQALDA

SEQ ID NO: 9761 - protein, 8 aa, Homo sapiens
YLFDSFFS

SEQ ID NO: 9762 - protein, 9 aa, Homo sapiens
YLFDSFFSL

SEQ ID NO: 9763 - protein, 10 aa, Homo sapiens
YLFDSFFSLI

SEQ ID NO: 9764 - protein, 11 aa, Homo sapiens
YLFDVQRNNIA

SEQ ID NO: 9765 - protein, 12 aa, Homo sapiens
YLFEEGYTNKGM

SEQ ID NO: 9766 - protein, 9 aa, Homo sapiens
YLFENVDNA

SEQ ID NO: 9767 - protein, 9 aa, Homo sapiens
YLFEPVAKA

SEQ ID NO: 9768 - protein, 9 aa, Homo sapiens
YLFFDLPHV

SEQ ID NO: 9769 - protein, 9 aa, Homo sapiens
YLFGCELKA

SEQ ID NO: 9770 - protein, 10 aa, Homo sapiens
YLFGCELKAD

SEQ ID NO: 9771 - protein, 10 aa, Homo sapiens
YLFITPPKTV

SEQ ID NO: 9772 - protein, 12 aa, Homo sapiens
YLFNIMDTPGHV

SEQ ID NO: 9773 - protein, 10 aa, Homo sapiens
YLFQYPVRPA

SEQ ID NO: 9774 - protein, 9 aa, Homo sapiens
YLFSGFQEA

SEQ ID NO: 9775 - protein, 9 aa, Homo sapiens
YLFYDGESV

SEQ ID NO: 9776 - protein, 11 aa, Homo sapiens
YLGDDRNIEEV

SEQ ID NO: 9777 - protein, 10 aa, Homo sapiens
YLGDFIEHYA

SEQ ID NO: 9778 - protein, 11 aa, Homo sapiens
YLGDFIEHYAQ

SEQ ID NO: 9779 - protein, 12 aa, Homo sapiens
YLGDFIEHYAQL

SEQ ID NO: 9780 - protein, 8 aa, Homo sapiens
YLGEEYPE

SEQ ID NO: 9781 - protein, 9 aa, Homo sapiens
YLGEEYPEV

SEQ ID NO: 9782 - protein, 9 aa, Homo sapiens
YLGEEYVKA

SEQ ID NO: 9783 - protein, 10 aa, Homo sapiens
YLGEEYVKAV

SEQ ID NO: 9784 - protein, 11 aa, Homo sapiens
YLGGLPEPMAV

SEQ ID NO: 9785 - protein, 9 aa, Homo sapiens
YLGKKVTHA

SEQ ID NO: 9786 - protein, 11 aa, Homo sapiens
YLGKKVTHAVV

SEQ ID NO: 9787 - protein, 9 aa, Homo sapiens
YLGKTVTNA

SEQ ID NO: 9788 - protein, 11 aa, Homo sapiens
YLGKTVTNAVV

SEQ ID NO: 9789 - protein, 10 aa, Homo sapiens
YLGLLENLRV

SEQ ID NO: 9790 - protein, 8 aa, Homo sapiens
YLGLPAFL

SEQ ID NO: 9791 - protein, 9 aa, Homo sapiens
YLGLPAFLL

SEQ ID NO: 9792 - protein, 9 aa, Homo sapiens
YLGPDTPAL

SEQ ID NO: 9793 - protein, 11 aa, Homo sapiens
YLGQDYEQLRV

SEQ ID NO: 9794 - protein, 9 aa, Homo sapiens
YLGSRPVKL

SEQ ID NO: 9795 - protein, 11 aa, Homo sapiens
YLGYFLPAEFL

SEQ ID NO: 9796 - protein, 9 aa, Homo sapiens
YLGYPVTNA

SEQ ID NO: 9797 - protein, 12 aa, Homo sapiens
YLHEEFPESWSV

SEQ ID NO: 9798 - protein, 11 aa, Homo sapiens
YLHESTQDELA

SEQ ID NO: 9799 - protein, 10 aa, Homo sapiens
YLIDIKTIAI

SEQ ID NO: 9800 - protein, 10 aa, Homo sapiens
YLIEEIGDVL

SEQ ID NO: 9801 - protein, 11 aa, Homo sapiens
YLIEEIGDVLL

SEQ ID NO: 9802 - protein, 12 aa, Homo sapiens
YLIEEIGDVLLA

SEQ ID NO: 9803 - protein, 11 aa, Homo sapiens
YLIEIAKNYNV

SEQ ID NO: 9804 - protein, 11 aa, Homo sapiens
YLIPLLERLDL

SEQ ID NO: 9805 - protein, 11 aa, Homo sapiens
YLIPNATQPES

SEQ ID NO: 9806 - protein, 9 aa, Homo sapiens
YLKEAVTTL

SEQ ID NO: 9807 - protein, 9 aa, Homo sapiens
YLKEFIHIL

SEQ ID NO: 9808 - protein, 9 aa, Homo sapiens
YLKELLNLA

SEQ ID NO: 9809 - protein, 11 aa, Homo sapiens
YLKNDNPEEHL

SEQ ID NO: 9810 - protein, 9 aa, Homo sapiens
YLKQVIDVL

SEQ ID NO: 9811 - protein, 9 aa, Homo sapiens
YLLDPSITL

SEQ ID NO: 9812 - protein, 9 aa, Homo sapiens
YLLDYPNNL

SEQ ID NO: 9813 - protein, 10 aa, Homo sapiens
YLLDYPNNLL

SEQ ID NO: 9814 - protein, 10 aa, Homo sapiens
YLLDYPNNVL

SEQ ID NO: 9815 - protein, 10 aa, Homo sapiens
YLLEHLHPFL

SEQ ID NO: 9816 - protein, 12 aa, Homo sapiens
YLLGDALLVHPV

SEQ ID NO: 9817 - protein, 10 aa, Homo sapiens
YLLGELGEAL

SEQ ID NO: 9818 - protein, 12 aa, Homo sapiens
YLLGELGEALRM

SEQ ID NO: 9819 - protein, 10 aa, Homo sapiens
YLLGLGPLEV

SEQ ID NO: 9820 - protein, 12 aa, Homo sapiens
YLLGVADLTGEL

SEQ ID NO: 9821 - protein, 11 aa, Homo sapiens
YLLKDKGEYTL

SEQ ID NO: 9822 - protein, 12 aa, Homo sapiens
YLLLEETEKQAV

SEQ ID NO: 9823 - protein, 9 aa, Homo sapiens
YLLLYLHSV

SEQ ID NO: 9824 - protein, 8 aa, Homo sapiens
YLLPAIVH

SEQ ID NO: 9825 - protein, 9 aa, Homo sapiens
YLLPESVDL

SEQ ID NO: 9826 - protein, 11 aa, Homo sapiens
YLLPQQPPPSL

SEQ ID NO: 9827 - protein, 10 aa, Homo sapiens
YLLQTNPTYL

SEQ ID NO: 9828 - protein, 11 aa, Homo sapiens
YLLQTNPTYLA

SEQ ID NO: 9829 - protein, 10 aa, Homo sapiens
YLLQTQPIYL

SEQ ID NO: 9830 - protein, 9 aa, Homo sapiens
YLLSYIQSI

SEQ ID NO: 9831 - protein, 12 aa, Homo sapiens
YLMAISDKDQQL

SEQ ID NO: 9832 - protein, 9 aa, Homo sapiens
YLMDEGAHL

SEQ ID NO: 9833 - protein, 9 aa, Homo sapiens
YLMDLTHLI

SEQ ID NO: 9834 - protein, 10 aa, Homo sapiens
YLMDLTHLIL

SEQ ID NO: 9835 - protein, 10 aa, Homo sapiens
YLMDTSGKVV

SEQ ID NO: 9836 - protein, 11 aa, Homo sapiens
YLMDTSGKVVT

SEQ ID NO: 9837 - protein, 11 aa, Homo sapiens
YLMEEDEDAYK

SEQ ID NO: 9838 - protein, 12 aa, Homo sapiens
YLMEEDEDAYKK

SEQ ID NO: 9839 - protein, 9 aa, Homo sapiens
YLMGERLGV

SEQ ID NO: 9840 - protein, 12 aa, Homo sapiens
YLMGERLGVHPL

SEQ ID NO: 9841 - protein, 9 aa, Homo sapiens
YLMQPSLQV

SEQ ID NO: 9842 - protein, 11 aa, Homo sapiens
YLNDEPPEGSM

SEQ ID NO: 9843 - protein, 10 aa, Homo sapiens
YLNEIKDSVV

SEQ ID NO: 9844 - protein, 9 aa, Homo sapiens
YLNENPLRA

SEQ ID NO: 9845 - protein, 12 aa, Homo sapiens
YLNEQGDRVYTL

SEQ ID NO: 9846 - protein, 11 aa, Homo sapiens
YLNEVAGKHGV

SEQ ID NO: 9847 - protein, 9 aa, Homo sapiens
YLNFFTKAT

SEQ ID NO: 9848 - protein, 9 aa, Homo sapiens
YLNHLEPPV

SEQ ID NO: 9849 - protein, 9 aa, Homo sapiens
YLNKHIQKV

SEQ ID NO: 9850 - protein, 9 aa, Homo sapiens
YLNSILQHA

SEQ ID NO: 9851 - protein, 11 aa, Homo sapiens
YLNTFEFMDKL

SEQ ID NO: 9852 - protein, 9 aa, Homo sapiens
YLNVQVKEL

SEQ ID NO: 9853 - protein, 10 aa, Homo sapiens
YLPDFRFTPF

SEQ ID NO: 9854 - protein, 9 aa, Homo sapiens
YLPEELAAL

SEQ ID NO: 9855 - protein, 9 aa, Homo sapiens
YLPFVLQEI

SEQ ID NO: 9856 - protein, 11 aa, Homo sapiens
YLPHYIPGVDP

SEQ ID NO: 9857 - protein, 9 aa, Homo sapiens
YLPLPTPKV

SEQ ID NO: 9858 - protein, 9 aa, Homo sapiens
YLPTKLAAV

SEQ ID NO: 9859 - protein, 9 aa, Homo sapiens
YLQAAIVRI

SEQ ID NO: 9860 - protein, 10 aa, Homo sapiens
YLQDGDLDVV

SEQ ID NO: 9861 - protein, 11 aa, Homo sapiens
YLQDLVEGMDF

SEQ ID NO: 9862 - protein, 10 aa, Homo sapiens
YLQEHAQEVV

SEQ ID NO: 9863 - protein, 11 aa, Homo sapiens
YLQEHAQEVVL

SEQ ID NO: 9864 - protein, 11 aa, Homo sapiens
YLQETYSKQVT

SEQ ID NO: 9865 - protein, 9 aa, Homo sapiens
YLQEVIDVL

SEQ ID NO: 9866 - protein, 10 aa, Homo sapiens
YLQEVIDVLE

SEQ ID NO: 9867 - protein, 11 aa, Homo sapiens
YLQEVIDVLET

SEQ ID NO: 9868 - protein, 12 aa, Homo sapiens
YLQEVIDVLETD

SEQ ID NO: 9869 - protein, 9 aa, Homo sapiens
YLQGSSVQL

SEQ ID NO: 9870 - protein, 9 aa, Homo sapiens
YLQHVQIRL

SEQ ID NO: 9871 - protein, 10 aa, Homo sapiens
YLQPLVAVQV

SEQ ID NO: 9872 - protein, 12 aa, Homo sapiens
YLRPETAQGIFL

SEQ ID NO: 9873 - protein, 11 aa, Homo sapiens
YLSDNIFTHFV

SEQ ID NO: 9874 - protein, 10 aa, Homo sapiens
YLSEDVFQHA

SEQ ID NO: 9875 - protein, 11 aa, Homo sapiens
YLSEVGDTQVV

SEQ ID NO: 9876 - protein, 9 aa, Homo sapiens
YLSGIAHFL

SEQ ID NO: 9877 - protein, 9 aa, Homo sapiens
YLSGYGVEL

SEQ ID NO: 9878 - protein, 10 aa, Homo sapiens
YLSGYGVELA

SEQ ID NO: 9879 - protein, 9 aa, Homo sapiens
YLSKLIPHA

SEQ ID NO: 9880 - protein, 9 aa, Homo sapiens
YLSSHIANV

SEQ ID NO: 9881 - protein, 10 aa, Homo sapiens
YLSTEDVPLA

SEQ ID NO: 9882 - protein, 9 aa, Homo sapiens
YLSTKNTIL

SEQ ID NO: 9883 - protein, 10 aa, Homo sapiens
YLTAEILELA

SEQ ID NO: 9884 - protein, 11 aa, Homo sapiens
YLTDDLEFLRA

SEQ ID NO: 9885 - protein, 9 aa, Homo sapiens
YLTGYNFTL

SEQ ID NO: 9886 - protein, 9 aa, Homo sapiens
YLTKEDLRV

SEQ ID NO: 9887 - protein, 10 aa, Homo sapiens
YLTNEGIAHL

SEQ ID NO: 9888 - protein, 9 aa, Homo sapiens
YLTQMDVKL

SEQ ID NO: 9889 - protein, 10 aa, Homo sapiens
YLTRVEVTEF

SEQ ID NO: 9890 - protein, 11 aa, Homo sapiens
YLVAEKVVVIT

SEQ ID NO: 9891 - protein, 11 aa, Homo sapiens
YLVDDSFSQAL

SEQ ID NO: 9892 - protein, 11 aa, Homo sapiens
YLVDLAGSEKV

SEQ ID NO: 9893 - protein, 10 aa, Homo sapiens
YLVGDELWVV

SEQ ID NO: 9894 - protein, 11 aa, Homo sapiens
YLVSVDGYMNM

SEQ ID NO: 9895 - protein, 9 aa, Homo sapiens
YLWCIEQTL

SEQ ID NO: 9896 - protein, 11 aa, Homo sapiens
YLWDLDHGFAG

SEQ ID NO: 9897 - protein, 8 aa, Homo sapiens
YLWSEVFS

SEQ ID NO: 9898 - protein, 9 aa, Homo sapiens
YLWSEVFSM

SEQ ID NO: 9899 - protein, 10 aa, Homo sapiens
YLWSEVFSMD

SEQ ID NO: 9900 - protein, 8 aa, Homo sapiens
YLWSEVYS

SEQ ID NO: 9901 - protein, 9 aa, Homo sapiens
YLWSEVYSM

SEQ ID NO: 9902 - protein, 10 aa, Homo sapiens
YLWSEVYSMD

SEQ ID NO: 9903 - protein, 11 aa, Homo sapiens
YLWSEVYSMDM

SEQ ID NO: 9904 - protein, 12 aa, Homo sapiens
YLYGDDRIEPYI

SEQ ID NO: 9905 - protein, 11 aa, Homo sapiens
YLYGTGSVAGV

SEQ ID NO: 9906 - protein, 12 aa, Homo sapiens
YLYKQPAEHLQL

SEQ ID NO: 9907 - protein, 10 aa, Homo sapiens
YLYNNLPHHV

SEQ ID NO: 9908 - protein, 12 aa, Homo sapiens
YLYQEGNNGPHL

SEQ ID NO: 9909 - protein, 12 aa, Homo sapiens
YMAGIDGEKEHA

SEQ ID NO: 9910 - protein, 9 aa, Homo sapiens
YMDENRNIT

SEQ ID NO: 9911 - protein, 10 aa, Homo sapiens
YMDENRNITF

SEQ ID NO: 9912 - protein, 9 aa, Homo sapiens
YMDNDYAKL

SEQ ID NO: 9913 - protein, 9 aa, Homo sapiens
YMEEVKEEV

SEQ ID NO: 9914 - protein, 9 aa, Homo sapiens
YMFEEHEMI

SEQ ID NO: 9915 - protein, 10 aa, Homo sapiens
YMFGKGIYFA

SEQ ID NO: 9916 - protein, 10 aa, Homo sapiens
YMGEEHLFSV

SEQ ID NO: 9917 - protein, 9 aa, Homo sapiens
YMHSGPVVA

SEQ ID NO: 9918 - protein, 10 aa, Homo sapiens
YMHSGPVVAM

SEQ ID NO: 9919 - protein, 9 aa, Homo sapiens
YMINFIHKL

SEQ ID NO: 9920 - protein, 9 aa, Homo sapiens
YMNGHSDVV

SEQ ID NO: 9921 - protein, 10 aa, Homo sapiens
YMNGHSDVVM

SEQ ID NO: 9922 - protein, 9 aa, Homo sapiens
YMNSGPVVA

SEQ ID NO: 9923 - protein, 10 aa, Homo sapiens
YMNSGPVVAM

SEQ ID NO: 9924 - protein, 9 aa, Homo sapiens
YMSSTDAKV

SEQ ID NO: 9925 - protein, 9 aa, Homo sapiens
YMVGPIEEA

SEQ ID NO: 9926 - protein, 11 aa, Homo sapiens
YQDELTALLRL

SEQ ID NO: 9927 - protein, 9 aa, Homo sapiens
YQDPHSTAV

SEQ ID NO: 9928 - protein, 11 aa, Homo sapiens
YQDPLDPTRSV

SEQ ID NO: 9929 - protein, 9 aa, Homo sapiens
YQEFTDHLV

SEQ ID NO: 9930 - protein, 9 aa, Homo sapiens
YQIAEQFRV

SEQ ID NO: 9931 - protein, 10 aa, Homo sapiens
YQIKGLEWLV

SEQ ID NO: 9932 - protein, 11 aa, Homo sapiens
YQLEIPENFTT

SEQ ID NO: 9933 - protein, 10 aa, Homo sapiens
YQNEDEKVTL

SEQ ID NO: 9934 - protein, 11 aa, Homo sapiens
YQQCINEAQRV

SEQ ID NO: 9935 - protein, 11 aa, Homo sapiens
YSATEETLQEV

SEQ ID NO: 9936 - protein, 10 aa, Homo sapiens
YSDNEMPPEA

SEQ ID NO: 9937 - protein, 9 aa, Homo sapiens
YTDDANQEV

SEQ ID NO: 9938 - protein, 9 aa, Homo sapiens
YTDKVVIGM

SEQ ID NO: 9939 - protein, 11 aa, Homo sapiens
YTDKVVIGMDV

SEQ ID NO: 9940 - protein, 9 aa, Homo sapiens
YTLGVKQLI

SEQ ID NO: 9941 - protein, 9 aa, Homo sapiens
YTSNIPIIL

SEQ ID NO: 9942 - protein, 10 aa, Homo sapiens
YTYEELLNRV

SEQ ID NO: 9943 - protein, 11 aa, Homo sapiens
YVDDGLISLQV

SEQ ID NO: 9944 - protein, 10 aa, Homo sapiens
YVDDTPAEQM

SEQ ID NO: 9945 - protein, 9 aa, Homo sapiens
YVDGDPHFI

SEQ ID NO: 9946 - protein, 9 aa, Homo sapiens
YVDPVITSI

SEQ ID NO: 9947 - protein, 10 aa, Homo sapiens
YVFDGKPPQL

SEQ ID NO: 9948 - protein, 9 aa, Homo sapiens
YVFENTVAT

SEQ ID NO: 9949 - protein, 10 aa, Homo sapiens
YVIEDDVNMA

SEQ ID NO: 9950 - protein, 11 aa, Homo sapiens
YVIEDDVNMAI

SEQ ID NO: 9951 - protein, 12 aa, Homo sapiens
YVINLDPAVHEV

SEQ ID NO: 9952 - protein, 9 aa, Homo sapiens
YVIYKVPQV

SEQ ID NO: 9953 - protein, 9 aa, Homo sapiens
YVQELLEKA

SEQ ID NO: 9954 - protein, 10 aa, Homo sapiens
YVVDLDDEYA

SEQ ID NO: 9955 - protein, 12 aa, Homo sapiens
YVYGEDMTPTLL

SEQ ID NO: 9956 - protein, 9 aa, Homo sapiens
AISESNINL

SEQ ID NO: 9957 - protein, 9 aa, Homo sapiens
ALDNGLFTL

SEQ ID NO: 9958 - protein, 10 aa, Homo sapiens
ALGGHPLLGV

SEQ ID NO: 9959 - protein, 12 aa, Homo sapiens
ALQDIGKNIYTI

SEQ ID NO: 9960 - protein, 9 aa, Homo sapiens
ALSEELVQL

SEQ ID NO: 9961 - protein, 9 aa, Homo sapiens
ALSSLAVVV

SEQ ID NO: 9962 - protein, 10 aa, Homo sapiens
ALWKEPGSNV

SEQ ID NO: 9963 - protein, 9 aa, Homo sapiens
AQHKFLVAV

SEQ ID NO: 9964 - protein, 9 aa, Homo sapiens
AQYLINVRL

SEQ ID NO: 9965 - protein, 9 aa, Homo sapiens
AQYLLQNSV

SEQ ID NO: 9966 - protein, 9 aa, Homo sapiens
AVGLAVLNV

SEQ ID NO: 9967 - protein, 9 aa, Homo sapiens
AVSNHVFHL

SEQ ID NO: 9968 - protein, 12 aa, Toxoplasma gondii ME49
DNIQGITKPAIR

SEQ ID NO: 9969 - protein, 10 aa, Homo sapiens
ELFPHSLLSV

SEQ ID NO: 9970 - protein, 9 aa, Homo sapiens
EVISKLYAV

SEQ ID NO: 9971 - protein, 9 aa, Homo sapiens
FASEVSNVL

SEQ ID NO: 9972 - protein, 10 aa, Homo sapiens
FIDKFTPPVV

SEQ ID NO: 9973 - protein, 9 aa, Homo sapiens
FLDGYVSQL

SEQ ID NO: 9974 - protein, 9 aa, Homo sapiens
FLSAIVSSV

SEQ ID NO: 9975 - protein, 9 aa, Homo sapiens
FLSHIPITL

SEQ ID NO: 9976 - protein, 9 aa, Homo sapiens
FVKDSIRLV

SEQ ID NO: 9977 - protein, 9 aa, Homo sapiens
GLAPQIHDL

SEQ ID NO: 9978 - protein, 9 aa, Homo sapiens
GLDGPPPTV

SEQ ID NO: 9979 - protein, 11 aa, Homo sapiens
GLIPIHADPRL

SEQ ID NO: 9980 - protein, 11 aa, Homo sapiens
GLLGAGGTVSV

SEQ ID NO: 9981 - protein, 9 aa, Homo sapiens
GLMRKVPRV

SEQ ID NO: 9982 - protein, 9 aa, Homo sapiens
GLNEHNHHL

SEQ ID NO: 9983 - protein, 9 aa, Homo sapiens
GLSPEIHTL

SEQ ID NO: 9984 - protein, 9 aa, Homo sapiens
GLWDKFSEL

SEQ ID NO: 9985 - protein, 9 aa, Homo sapiens
HIMPTVHTV

SEQ ID NO: 9986 - protein, 9 aa, Homo sapiens
HLFNVAHTL

SEQ ID NO: 9987 - protein, 9 aa, Homo sapiens
HLINFSETL

SEQ ID NO: 9988 - protein, 9 aa, Homo sapiens
HLLGDQISL

SEQ ID NO: 9989 - protein, 9 aa, Homo sapiens
HLQDKIQKL

SEQ ID NO: 9990 - protein, 9 aa, Homo sapiens
HLVPEVPTV

SEQ ID NO: 9991 - protein, 9 aa, Homo sapiens
HQLPLPHNV

SEQ ID NO: 9992 - protein, 11 aa, Homo sapiens
ILLEHGADPNL

SEQ ID NO: 9993 - protein, 10 aa, Homo sapiens
ILMEHIHKLK

SEQ ID NO: 9994 - protein, 9 aa, Homo sapiens
ILQERIPWV

SEQ ID NO: 9995 - protein, 9 aa, Homo sapiens
IQYIRPVFV

SEQ ID NO: 9996 - protein, 9 aa, Homo sapiens
KIIDIQEKV

SEQ ID NO: 9997 - protein, 9 aa, Homo sapiens
KIQPALQEK

SEQ ID NO: 9998 - protein, 10 aa, Homo sapiens
KLADIQIEQL

SEQ ID NO: 9999 - protein, 10 aa, Homo sapiens
KLDEYIAIAK

SEQ ID NO: 10000 - protein, 11 aa, Homo sapiens
KLFPKGTIFTA

SEQ ID NO: 10001 - protein, 9 aa, Homo sapiens
KLIDPQTQV

SEQ ID NO: 10002 - protein, 9 aa, Homo sapiens
KLIEYYQQL

SEQ ID NO: 10003 - protein, 11 aa, Homo sapiens
KLLDLKKQLAV

SEQ ID NO: 10004 - protein, 10 aa, Homo sapiens
KLPDLPQNSV

SEQ ID NO: 10005 - protein, 9 aa, Homo sapiens
KLPTPTSSV

SEQ ID NO: 10006 - protein, 9 aa, Homo sapiens
KLREDLERL

SEQ ID NO: 10007 - protein, 10 aa, Homo sapiens
KLYEKKLLKL

SEQ ID NO: 10008 - protein, 10 aa, Homo sapiens
KLYSSEQLLI

SEQ ID NO: 10009 - protein, 9 aa, Homo sapiens
KMAPALRKV

SEQ ID NO: 10010 - protein, 9 aa, Homo sapiens
KTKDGVREV

SEQ ID NO: 10011 - protein, 11 aa, Homo sapiens
KTLQPSSQNTK

SEQ ID NO: 10012 - protein, 9 aa, Homo sapiens
KVIDTQQKV

SEQ ID NO: 10013 - protein, 11 aa, Homo sapiens
KVLRESGLKYV

SEQ ID NO: 10014 - protein, 9 aa, Homo sapiens
LLDEPTNML

SEQ ID NO: 10015 - protein, 9 aa, Homo sapiens
LLHSFVDSV

SEQ ID NO: 10016 - protein, 11 aa, Homo sapiens
LLLAAARLAAA

SEQ ID NO: 10017 - protein, 9 aa, Homo sapiens
LLLPGLETV

SEQ ID NO: 10018 - protein, 9 aa, Homo sapiens
LLLPGPSAA

SEQ ID NO: 10019 - protein, 10 aa, Homo sapiens
LLLPPPPCPA

SEQ ID NO: 10020 - protein, 9 aa, Homo sapiens
LLPSHPLEL

SEQ ID NO: 10021 - protein, 9 aa, Homo sapiens
LLYGHTVTV

SEQ ID NO: 10022 - protein, 9 aa, Homo sapiens
LQLDKEFQL

SEQ ID NO: 10023 - protein, 9 aa, Homo sapiens
LVTDIQPVL

SEQ ID NO: 10024 - protein, 9 aa, Homo sapiens
LYPEVFEKF

SEQ ID NO: 10025 - protein, 11 aa, Homo sapiens
NLAGENILNPL

SEQ ID NO: 10026 - protein, 9 aa, Homo sapiens
QLDETNALL

SEQ ID NO: 10027 - protein, 10 aa, Homo sapiens
QLHAGSLVSV

SEQ ID NO: 10028 - protein, 9 aa, Homo sapiens
QLIEKNWLL

SEQ ID NO: 10029 - protein, 9 aa, Homo sapiens
QLNEKVAQL

SEQ ID NO: 10030 - protein, 9 aa, Homo sapiens
QLTEMLPSI

SEQ ID NO: 10031 - protein, 11 aa, Homo sapiens
RIAGIRGIQGV

SEQ ID NO: 10032 - protein, 11 aa, Homo sapiens
RLAEALPKQSV

SEQ ID NO: 10033 - protein, 12 aa, Homo sapiens
RLIGELAKEIRK

SEQ ID NO: 10034 - protein, 9 aa, Homo sapiens
RLLSKIHNV

SEQ ID NO: 10035 - protein, 9 aa, Homo sapiens
RLNKVIKSV

SEQ ID NO: 10036 - protein, 9 aa, Homo sapiens
RLQSKTIKV

SEQ ID NO: 10037 - protein, 10 aa, Homo sapiens
RLYDGLFKVI

SEQ ID NO: 10038 - protein, 10 aa, Homo sapiens
RMVDMPANNK

SEQ ID NO: 10039 - protein, 11 aa, Homo sapiens
RVIDDSLVVGV

SEQ ID NO: 10040 - protein, 9 aa, Homo sapiens
RYLDEINLL

SEQ ID NO: 10041 - protein, 9 aa, Homo sapiens
SAVGHVFSL

SEQ ID NO: 10042 - protein, 9 aa, Homo sapiens
SISDVIAQV

SEQ ID NO: 10043 - protein, 9 aa, Homo sapiens
SLADLNSRL

SEQ ID NO: 10044 - protein, 10 aa, Homo sapiens
SLADVDPMQL

SEQ ID NO: 10045 - protein, 9 aa, Homo sapiens
SLAERVDRL

SEQ ID NO: 10046 - protein, 9 aa, Homo sapiens
SLDTQPKKV

SEQ ID NO: 10047 - protein, 10 aa, Homo sapiens
SLEGIPLAQV

SEQ ID NO: 10048 - protein, 9 aa, Homo sapiens
SLITPLQAV

SEQ ID NO: 10049 - protein, 9 aa, Homo sapiens
SLLAANNLL

SEQ ID NO: 10050 - protein, 10 aa, Homo sapiens
SLLEQGLVEA

SEQ ID NO: 10051 - protein, 10 aa, Homo sapiens
SLLGTENASV

SEQ ID NO: 10052 - protein, 9 aa, Homo sapiens
SLLPAQYNL

SEQ ID NO: 10053 - protein, 9 aa, Homo sapiens
SLLPSVPAL

SEQ ID NO: 10054 - protein, 9 aa, Homo sapiens
SLSAFTPAL

SEQ ID NO: 10055 - protein, 9 aa, Homo sapiens
SLSFVSPSL

SEQ ID NO: 10056 - protein, 9 aa, Homo sapiens
SLVATLQSV

SEQ ID NO: 10057 - protein, 11 aa, Homo sapiens
SLYDQAEKLVS

SEQ ID NO: 10058 - protein, 9 aa, Homo sapiens
SMNTHLKAV

SEQ ID NO: 10059 - protein, 9 aa, Homo sapiens
SVASTITGV

SEQ ID NO: 10060 - protein, 9 aa, Homo sapiens
SVLKSIQEV

SEQ ID NO: 10061 - protein, 9 aa, Homo sapiens
SVYGKLRKV

SEQ ID NO: 10062 - protein, 9 aa, Homo sapiens
TLAFVSPSL

SEQ ID NO: 10063 - protein, 9 aa, Homo sapiens
TLKDTITSV

SEQ ID NO: 10064 - protein, 10 aa, Homo sapiens
TLSDGVVVQV

SEQ ID NO: 10065 - protein, 9 aa, Homo sapiens
TLSQVIPMV

SEQ ID NO: 10066 - protein, 9 aa, Homo sapiens
TLTGKTITL

SEQ ID NO: 10067 - protein, 9 aa, Homo sapiens
TLTNIIHNL

SEQ ID NO: 10068 - protein, 9 aa, Homo sapiens
TLTSNIPEI

SEQ ID NO: 10069 - protein, 9 aa, Homo sapiens
TVPPVFVSV

SEQ ID NO: 10070 - protein, 10 aa, Homo sapiens
VINDVRDIFL

SEQ ID NO: 10071 - protein, 9 aa, Homo sapiens
VLAELPQQV

SEQ ID NO: 10072 - protein, 9 aa, Homo sapiens
VLWPESISV

SEQ ID NO: 10073 - protein, 9 aa, Homo sapiens
VMAGDIYSV

SEQ ID NO: 10074 - protein, 9 aa, Homo sapiens
VQIGDIVTV

SEQ ID NO: 10075 - protein, 9 aa, Homo sapiens
VQVPVPVTV

SEQ ID NO: 10076 - protein, 9 aa, Homo sapiens
VQYAYFKKV

SEQ ID NO: 10077 - protein, 9 aa, Homo sapiens
VQYNEPLKV

SEQ ID NO: 10078 - protein, 9 aa, Homo sapiens
VTDHNLHEL

SEQ ID NO: 10079 - protein, 9 aa, Homo sapiens
VVVDPIQSV

SEQ ID NO: 10080 - protein, 9 aa, Homo sapiens
VVVGDLVEV

SEQ ID NO: 10081 - protein, 9 aa, Homo sapiens
YINPVSSAV

SEQ ID NO: 10082 - protein, 9 aa, Homo sapiens
YLEPKLTQV

SEQ ID NO: 10083 - protein, 10 aa, Homo sapiens
AALKKALAAA

SEQ ID NO: 10084 - protein, 10 aa, Homo sapiens
AGQAFRKFLP

SEQ ID NO: 10085 - protein, 10 aa, Homo sapiens
AGWNAYIDNL

SEQ ID NO: 10086 - protein, 9 aa, Homo sapiens
ALAKAPFAA

SEQ ID NO: 10087 - protein, 9 aa, Homo sapiens
ALAKHLIKI

SEQ ID NO: 10088 - protein, 9 aa, Homo sapiens
ALARLVLRL

SEQ ID NO: 10089 - protein, 9 aa, Homo sapiens
ALLNVELEL

SEQ ID NO: 10090 - protein, 12 aa, Homo sapiens
ALLYEDALYTVL

SEQ ID NO: 10091 - protein, 10 aa, Homo sapiens
ALQEACEAYL

SEQ ID NO: 10092 - protein, 9 aa, Homo sapiens
AVCPLVVRL

SEQ ID NO: 10093 - protein, 9 aa, Homo sapiens
DLLQIPPEL

SEQ ID NO: 10094 - protein, 9 aa, Homo sapiens
EMLQQVTQL

SEQ ID NO: 10095 - protein, 9 aa, Homo sapiens
EPSVPVQPL

SEQ ID NO: 10096 - protein, 8 aa, Homo sapiens
FADKVPKT

SEQ ID NO: 10097 - protein, 9 aa, Homo sapiens
FADKVPKTA

SEQ ID NO: 10098 - protein, 10 aa, Homo sapiens
FADKVPKTAE

SEQ ID NO: 10099 - protein, 8 aa, Homo sapiens
FGGHIRSV

SEQ ID NO: 10100 - protein, 9 aa, Homo sapiens
FIADHCPTL

SEQ ID NO: 10101 - protein, 10 aa, Homo sapiens
FIASKGVKLV

SEQ ID NO: 10102 - protein, 9 aa, Homo sapiens
FILAAIYHL

SEQ ID NO: 10103 - protein, 11 aa, Homo sapiens
FILPTLVPWYF

SEQ ID NO: 10104 - protein, 9 aa, Homo sapiens
FLAPLLAKL

SEQ ID NO: 10105 - protein, 10 aa, Homo sapiens
FLFDHQLVSC

SEQ ID NO: 10106 - protein, 9 aa, Homo sapiens
FLFSDVCRV

SEQ ID NO: 10107 - protein, 9 aa, Homo sapiens
FLHQQPANC

SEQ ID NO: 10108 - protein, 9 aa, Homo sapiens
FLHRLPILL

SEQ ID NO: 10109 - protein, 9 aa, Homo sapiens
FLLHQKIAL

SEQ ID NO: 10110 - protein, 10 aa, Homo sapiens
FLLNLQNCHL

SEQ ID NO: 10111 - protein, 9 aa, Homo sapiens
FLLQQLPPV

SEQ ID NO: 10112 - protein, 9 aa, Homo sapiens
FLLTIENEL

SEQ ID NO: 10113 - protein, 9 aa, Homo sapiens
FLMKLQSLL

SEQ ID NO: 10114 - protein, 11 aa, Homo sapiens
FLQDTIEEMAL

SEQ ID NO: 10115 - protein, 9 aa, Homo sapiens
FLQRKLASL

SEQ ID NO: 10116 - protein, 10 aa, Homo sapiens
FLTDMPDILL

SEQ ID NO: 10117 - protein, 10 aa, Homo sapiens
FLYKEKLVSV

SEQ ID NO: 10118 - protein, 9 aa, Homo sapiens
FMDVKCPGC

SEQ ID NO: 10119 - protein, 9 aa, Homo sapiens
FMIKFPWKL

SEQ ID NO: 10120 - protein, 9 aa, Homo sapiens
FMSSHIKSV

SEQ ID NO: 10121 - protein, 9 aa, Homo sapiens
FVARMIPKV

SEQ ID NO: 10122 - protein, 11 aa, Homo sapiens
GIKEDTEEHHL

SEQ ID NO: 10123 - protein, 9 aa, Homo sapiens
GLADRCPAL

SEQ ID NO: 10124 - protein, 9 aa, Homo sapiens
GLAEKIRAC

SEQ ID NO: 10125 - protein, 9 aa, Homo sapiens
GLAKRVWSL

SEQ ID NO: 10126 - protein, 9 aa, Homo sapiens
GLCERLVSL

SEQ ID NO: 10127 - protein, 9 aa, Homo sapiens
GLCPHVVVL

SEQ ID NO: 10128 - protein, 11 aa, Homo sapiens
GLLDAAHFCYL

SEQ ID NO: 10129 - protein, 9 aa, Homo sapiens
GLLDRIMQL

SEQ ID NO: 10130 - protein, 9 aa, Homo sapiens
GLLEHILYC

SEQ ID NO: 10131 - protein, 10 aa, Homo sapiens
GLLGDIAIHL

SEQ ID NO: 10132 - protein, 9 aa, Homo sapiens
GLLRLAIRL

SEQ ID NO: 10133 - protein, 9 aa, Homo sapiens
GLLTRLLQV

SEQ ID NO: 10134 - protein, 9 aa, Homo sapiens
GLRTLGPAL

SEQ ID NO: 10135 - protein, 9 aa, Homo sapiens
GMMKELHKV

SEQ ID NO: 10136 - protein, 9 aa, Homo sapiens
HLCEHIWTL

SEQ ID NO: 10137 - protein, 9 aa, Homo sapiens
HLLHSKFHL

SEQ ID NO: 10138 - protein, 9 aa, Homo sapiens
HLLVHDVAL

SEQ ID NO: 10139 - protein, 9 aa, Homo sapiens
HMVEKTYEC

SEQ ID NO: 10140 - protein, 9 aa, Homo sapiens
IAVHVVPDQ

SEQ ID NO: 10141 - protein, 10 aa, Homo sapiens
IAVHVVPDQL

SEQ ID NO: 10142 - protein, 10 aa, Homo sapiens
IAYLKKATNE

SEQ ID NO: 10143 - protein, 9 aa, Homo sapiens
ILDVTVVYL

SEQ ID NO: 10144 - protein, 11 aa, Homo sapiens
ILLSEEDLQML

SEQ ID NO: 10145 - protein, 11 aa, Homo sapiens
ILLTSTELFQL

SEQ ID NO: 10146 - protein, 9 aa, Homo sapiens
ILPEKVARV

SEQ ID NO: 10147 - protein, 9 aa, Homo sapiens
ILVDWLVQV

SEQ ID NO: 10148 - protein, 9 aa, Homo sapiens
ILWSHLELL

SEQ ID NO: 10149 - protein, 12 aa, Homo sapiens
IVNTNVPRASVP

SEQ ID NO: 10150 - protein, 9 aa, Homo sapiens
KICDYLFNV

SEQ ID NO: 10151 - protein, 10 aa, Homo sapiens
KIGEHTPSAL

SEQ ID NO: 10152 - protein, 9 aa, Homo sapiens
KIIKIIITV

SEQ ID NO: 10153 - protein, 9 aa, Homo sapiens
KLCDIIVHI

SEQ ID NO: 10154 - protein, 9 aa, Homo sapiens
KLDSPRVTV

SEQ ID NO: 10155 - protein, 9 aa, Homo sapiens
KLIAKIPTI

SEQ ID NO: 10156 - protein, 10 aa, Homo sapiens
KLIGHGVKGV

SEQ ID NO: 10157 - protein, 9 aa, Homo sapiens
KLLARISKL

SEQ ID NO: 10158 - protein, 10 aa, Homo sapiens
KLLEFVPHHC

SEQ ID NO: 10159 - protein, 9 aa, Homo sapiens
KLLEREGAL

SEQ ID NO: 10160 - protein, 11 aa, Homo sapiens
KLLNHPHIIKL

SEQ ID NO: 10161 - protein, 10 aa, Homo sapiens
KLNEDMACSV

SEQ ID NO: 10162 - protein, 9 aa, Homo sapiens
KLWNKIWCI

SEQ ID NO: 10163 - protein, 11 aa, Homo sapiens
KLWPEASKVKV

SEQ ID NO: 10164 - protein, 9 aa, Homo sapiens
KVLNKVITV

SEQ ID NO: 10165 - protein, 8 aa, Homo sapiens
LFDRPMHV

SEQ ID NO: 10166 - protein, 9 aa, Homo sapiens
LLADLKTMV

SEQ ID NO: 10167 - protein, 9 aa, Homo sapiens
LLAPFCPHL

SEQ ID NO: 10168 - protein, 8 aa, Homo sapiens
LLGRRAPV

SEQ ID NO: 10169 - protein, 11 aa, Homo sapiens
LLKNSPLVSRL

SEQ ID NO: 10170 - protein, 12 aa, Homo sapiens
LLKNSPLVSRLT

SEQ ID NO: 10171 - protein, 9 aa, Homo sapiens
LLLPLPVPA

SEQ ID NO: 10172 - protein, 9 aa, Homo sapiens
LLSSHVRGV

SEQ ID NO: 10173 - protein, 9 aa, Homo sapiens
LLYRYMHFL

SEQ ID NO: 10174 - protein, 10 aa, Homo sapiens
LMEHIHKLKA

SEQ ID NO: 10175 - protein, 9 aa, Homo sapiens
LMYDGTKEV

SEQ ID NO: 10176 - protein, 9 aa, Homo sapiens
LSMKTLQLL

SEQ ID NO: 10177 - protein, 9 aa, Homo sapiens
LVKELRTVV

SEQ ID NO: 10178 - protein, 9 aa, Homo sapiens
LVRPEVDVM

SEQ ID NO: 10179 - protein, 9 aa, Homo sapiens
MEHIHKLKA

SEQ ID NO: 10180 - protein, 9 aa, Homo sapiens
MLDEILLQL

SEQ ID NO: 10181 - protein, 9 aa, Homo sapiens
NCPERIITL

SEQ ID NO: 10182 - protein, 11 aa, Homo sapiens
NLASFIEQVAV

SEQ ID NO: 10183 - protein, 9 aa, Homo sapiens
NLCPTRIEV

SEQ ID NO: 10184 - protein, 10 aa, Homo sapiens
NLYSKMLAKV

SEQ ID NO: 10185 - protein, 9 aa, Homo sapiens
QIMEYIHKI

SEQ ID NO: 10186 - protein, 9 aa, Homo sapiens
QIVERVIAV

SEQ ID NO: 10187 - protein, 9 aa, Homo sapiens
QLCDLETKL

SEQ ID NO: 10188 - protein, 9 aa, Homo sapiens
QLCEDIIQL

SEQ ID NO: 10189 - protein, 9 aa, Homo sapiens
QLIKHAVYL

SEQ ID NO: 10190 - protein, 9 aa, Homo sapiens
QLLALLPSL

SEQ ID NO: 10191 - protein, 9 aa, Homo sapiens
QLLDVIHYV

SEQ ID NO: 10192 - protein, 9 aa, Homo sapiens
QLLELPLNL

SEQ ID NO: 10193 - protein, 11 aa, Homo sapiens
QLLETISQLYL

SEQ ID NO: 10194 - protein, 9 aa, Homo sapiens
QLLETLNQL

SEQ ID NO: 10195 - protein, 9 aa, Homo sapiens
QLLKFIPGL

SEQ ID NO: 10196 - protein, 9 aa, Homo sapiens
QLLKSLPEL

SEQ ID NO: 10197 - protein, 9 aa, Homo sapiens
QLLSEITRV

SEQ ID NO: 10198 - protein, 9 aa, Homo sapiens
QLMERNPEI

SEQ ID NO: 10199 - protein, 9 aa, Homo sapiens
QLMNLIRSV

SEQ ID NO: 10200 - protein, 9 aa, Homo sapiens
QLMPLPVKV

SEQ ID NO: 10201 - protein, 9 aa, Homo sapiens
QLNHYVKAV

SEQ ID NO: 10202 - protein, 9 aa, Homo sapiens
QLSTVITQV

SEQ ID NO: 10203 - protein, 9 aa, Homo sapiens
QLYLKLWNL

SEQ ID NO: 10204 - protein, 9 aa, Homo sapiens
QLYNSLIFL

SEQ ID NO: 10205 - protein, 9 aa, Homo sapiens
QMCGLHIVV

SEQ ID NO: 10206 - protein, 9 aa, Homo sapiens
QVCAIIERV

SEQ ID NO: 10207 - protein, 10 aa, Homo sapiens
QVMPGNIVFV

SEQ ID NO: 10208 - protein, 9 aa, Homo sapiens
QVVAIVHAV

SEQ ID NO: 10209 - protein, 9 aa, Homo sapiens
RIYKYIHKV

SEQ ID NO: 10210 - protein, 9 aa, Homo sapiens
RLCGLKVEV

SEQ ID NO: 10211 - protein, 9 aa, Homo sapiens
RLFRVFVHV

SEQ ID NO: 10212 - protein, 9 aa, Homo sapiens
RLKDEIAEV

SEQ ID NO: 10213 - protein, 9 aa, Homo sapiens
RLMKHDVNL

SEQ ID NO: 10214 - protein, 9 aa, Homo sapiens
RLVDLDWRV

SEQ ID NO: 10215 - protein, 9 aa, Homo sapiens
RMFPGEVAL

SEQ ID NO: 10216 - protein, 9 aa, Homo sapiens
RMLDVLEYI

SEQ ID NO: 10217 - protein, 9 aa, Homo sapiens
RMLHFLTAV

SEQ ID NO: 10218 - protein, 9 aa, Homo sapiens
RMLIKLLEV

SEQ ID NO: 10219 - protein, 9 aa, Homo sapiens
RMVHILTSV

SEQ ID NO: 10220 - protein, 9 aa, Homo sapiens
SIAELVPKC

SEQ ID NO: 10221 - protein, 9 aa, Homo sapiens
SILRGIFSV

SEQ ID NO: 10222 - protein, 11 aa, Homo sapiens
SIQQSIERLLV

SEQ ID NO: 10223 - protein, 9 aa, Homo sapiens
SLADCIPLL

SEQ ID NO: 10224 - protein, 10 aa, Homo sapiens
SLAKHGIVAL

SEQ ID NO: 10225 - protein, 9 aa, Homo sapiens
SLFPHAICL

SEQ ID NO: 10226 - protein, 9 aa, Homo sapiens
SLFSAVHKI

SEQ ID NO: 10227 - protein, 9 aa, Homo sapiens
SLGSFICKL

SEQ ID NO: 10228 - protein, 9 aa, Homo sapiens
SLHSKLFRV

SEQ ID NO: 10229 - protein, 9 aa, Homo sapiens
SLIKHKIML

SEQ ID NO: 10230 - protein, 9 aa, Homo sapiens
SLLACEFLL

SEQ ID NO: 10231 - protein, 10 aa, Homo sapiens
SLLDHLLTEC

SEQ ID NO: 10232 - protein, 9 aa, Homo sapiens
SLLHMPFTI

SEQ ID NO: 10233 - protein, 9 aa, Homo sapiens
SLLRALERL

SEQ ID NO: 10234 - protein, 9 aa, Homo sapiens
SLLRHLEKV

SEQ ID NO: 10235 - protein, 9 aa, Homo sapiens
SLLRKIYEI

SEQ ID NO: 10236 - protein, 10 aa, Homo sapiens
SLSLLCIPAI

SEQ ID NO: 10237 - protein, 9 aa, Homo sapiens
SLSSLVVQL

SEQ ID NO: 10238 - protein, 9 aa, Homo sapiens
SLWSIISKV

SEQ ID NO: 10239 - protein, 9 aa, Homo sapiens
SLYHIYVAL

SEQ ID NO: 10240 - protein, 9 aa, Homo sapiens
SMHNVKLFL

SEQ ID NO: 10241 - protein, 9 aa, Homo sapiens
SMLGRVVKV

SEQ ID NO: 10242 - protein, 9 aa, Homo sapiens
TILEKCFKV

SEQ ID NO: 10243 - protein, 9 aa, Homo sapiens
TIMKKVTSV

SEQ ID NO: 10244 - protein, 10 aa, Homo sapiens
TIPDFIFANV

SEQ ID NO: 10245 - protein, 9 aa, Homo sapiens
TLAKLIAKI

SEQ ID NO: 10246 - protein, 10 aa, Homo sapiens
TLIAVVAVVA

SEQ ID NO: 10247 - protein, 9 aa, Homo sapiens
TLLGLSLQV

SEQ ID NO: 10248 - protein, 11 aa, Homo sapiens
TLLHAGGLARA

SEQ ID NO: 10249 - protein, 11 aa, Homo sapiens
TLMNLGGLAVA

SEQ ID NO: 10250 - protein, 11 aa, Homo sapiens
TLMPEKLSHKL

SEQ ID NO: 10251 - protein, 9 aa, Homo sapiens
TMLLNIPLV

SEQ ID NO: 10252 - protein, 10 aa, Homo sapiens
TVYGGYLCSV

SEQ ID NO: 10253 - protein, 9 aa, Homo sapiens
VAVEKVQLA

SEQ ID NO: 10254 - protein, 9 aa, Homo sapiens
VIWKALIHL

SEQ ID NO: 10255 - protein, 10 aa, Homo sapiens
VLAELKGVTC

SEQ ID NO: 10256 - protein, 9 aa, Homo sapiens
VLAPRVLRA

SEQ ID NO: 10257 - protein, 9 aa, Homo sapiens
VLDHNPPGC

SEQ ID NO: 10258 - protein, 10 aa, Homo sapiens
VLFDVSIMAV

SEQ ID NO: 10259 - protein, 10 aa, Homo sapiens
VLLHFKHIYL

SEQ ID NO: 10260 - protein, 9 aa, Homo sapiens
VLQYVVPEV

SEQ ID NO: 10261 - protein, 12 aa, Homo sapiens
VLRDNIQGITKP

SEQ ID NO: 10262 - protein, 8 aa, Homo sapiens
VVIAHDVD

SEQ ID NO: 10263 - protein, 9 aa, Homo sapiens
WMLDKLTGV

SEQ ID NO: 10264 - protein, 9 aa, Homo sapiens
YGMERVWCV

SEQ ID NO: 10265 - protein, 9 aa, Homo sapiens
YLARFLIKL

SEQ ID NO: 10266 - protein, 10 aa, Homo sapiens
YLFDEIDQAL

SEQ ID NO: 10267 - protein, 10 aa, Homo sapiens
YLFGERLLEC

SEQ ID NO: 10268 - protein, 9 aa, Homo sapiens
YLLKKLLQL

SEQ ID NO: 10269 - protein, 9 aa, Homo sapiens
YLYKYLWRL

SEQ ID NO: 10270 - protein, 9 aa, Mycobacterium tuberculosis
AAYPITGKL

SEQ ID NO: 10271 - protein, 9 aa, Mycobacterium tuberculosis
AIATFAAPV

SEQ ID NO: 10272 - protein, 9 aa, Mycobacterium tuberculosis
ATFAAPVAL

SEQ ID NO: 10273 - protein, 10 aa, Mycobacterium tuberculosis
AVAVVAMAAI

SEQ ID NO: 10274 - protein, 10 aa, Mycobacterium tuberculosis
TMIKTAVAVV

SEQ ID NO: 10275 - protein, 9 aa, Leishmania major
ALLAFTLGV

SEQ ID NO: 10276 - protein, 9 aa, Leishmania major
ALRERRMKV

SEQ ID NO: 10277 - protein, 9 aa, Leishmania major
CLALIAWRV

SEQ ID NO: 10278 - protein, 9 aa, Leishmania major
FMEVFGMLV

SEQ ID NO: 10279 - protein, 9 aa, Homo sapiens
FQNIRPLFI

SEQ ID NO: 10280 - protein, 9 aa, Leishmania major
GLEQQIQEI

SEQ ID NO: 10281 - protein, 9 aa, Leishmania major
KIYQIGRSV

SEQ ID NO: 10282 - protein, 9 aa, Leishmania major
KLVRELFRV

SEQ ID NO: 10283 - protein, 9 aa, Leishmania major
LLHDRQHSI

SEQ ID NO: 10284 - protein, 9 aa, Leishmania major
LLPAPLVSV

SEQ ID NO: 10285 - protein, 9 aa, Leishmania major
MLLWTAVAV

SEQ ID NO: 10286 - protein, 9 aa, Leishmania major
MLQTNSLAL

SEQ ID NO: 10287 - protein, 9 aa, Leishmania major
MLVQSCTSI

SEQ ID NO: 10288 - protein, 9 aa, Leishmania major
MVLNAMAWL

SEQ ID NO: 10289 - protein, 9 aa, Leishmania major
PLSPATRRL

SEQ ID NO: 10290 - protein, 9 aa, Leishmania major
QLNKKIYQI

SEQ ID NO: 10291 - protein, 9 aa, Leishmania major
RLAGFLAGL

SEQ ID NO: 10292 - protein, 9 aa, Leishmania major
SLQFSAFLL

SEQ ID NO: 10293 - protein, 10 aa, Homo sapiens
SQYPFHVPLL

SEQ ID NO: 10294 - protein, 9 aa, Leishmania major
TLGVKQMVV

SEQ ID NO: 10295 - protein, 9 aa, Leishmania major
TLLDALGML

SEQ ID NO: 10296 - protein, 9 aa, Leishmania major
TMLELLTQL

SEQ ID NO: 10297 - protein, 9 aa, Leishmania major
VVAGMLRWV

SEQ ID NO: 10298 - protein, 9 aa, Leishmania major
VVSVLTHSV

SEQ ID NO: 10299 - protein, 9 aa, Leishmania major
WIPPVVSVL

SEQ ID NO: 10300 - protein, 9 aa, Leishmania major
YLRTFPAAL

SEQ ID NO: 10301 - protein, 10 aa, Homo sapiens
AIAQALAGEV

SEQ ID NO: 10302 - protein, 10 aa, Homo sapiens
AIIGGVIAVV

SEQ ID NO: 10303 - protein, 9 aa, Homo sapiens
AILGIHNEV

SEQ ID NO: 10304 - protein, 10 aa, Homo sapiens
AINPKLLQLV

SEQ ID NO: 10305 - protein, 9 aa, Homo sapiens
AIQEQITRV

SEQ ID NO: 10306 - protein, 10 aa, Homo sapiens
ALDVQGIYRV

SEQ ID NO: 10307 - protein, 10 aa, Homo sapiens
ALFAGGKLRV

SEQ ID NO: 10308 - protein, 10 aa, Homo sapiens
ALFPGDVDRL

SEQ ID NO: 10309 - protein, 9 aa, Homo sapiens
ALGTLVSHV

SEQ ID NO: 10310 - protein, 9 aa, Homo sapiens
ALLEEAEQL

SEQ ID NO: 10311 - protein, 9 aa, Homo sapiens
ALLEQAEQL

SEQ ID NO: 10312 - protein, 9 aa, Homo sapiens
ALLETEFSL

SEQ ID NO: 10313 - protein, 9 aa, Homo sapiens
ALLPQASNV

SEQ ID NO: 10314 - protein, 9 aa, Homo sapiens
ALLSDVQLL

SEQ ID NO: 10315 - protein, 9 aa, Homo sapiens
ALNAVRLLV

SEQ ID NO: 10316 - protein, 10 aa, Homo sapiens
ALQGELKIAV

SEQ ID NO: 10317 - protein, 10 aa, Homo sapiens
ALVEKGEFAL

SEQ ID NO: 10318 - protein, 10 aa, Homo sapiens
AMKTRQAFYL

SEQ ID NO: 10319 - protein, 9 aa, Homo sapiens
AVDDFIEKL

SEQ ID NO: 10320 - protein, 9 aa, Homo sapiens
DIEGASKIL

SEQ ID NO: 10321 - protein, 10 aa, Homo sapiens
DIKDGVSDKV

SEQ ID NO: 10322 - protein, 10 aa, Homo sapiens
DILGLSKAAV

SEQ ID NO: 10323 - protein, 9 aa, Homo sapiens
DLATRNILV

SEQ ID NO: 10324 - protein, 9 aa, Homo sapiens
DLEVKQEEV

SEQ ID NO: 10325 - protein, 10 aa, Homo sapiens
DLSDIPGAQV

SEQ ID NO: 10326 - protein, 9 aa, Homo sapiens
DLVHDDFSV

SEQ ID NO: 10327 - protein, 9 aa, Homo sapiens
DVEEIFRKV

SEQ ID NO: 10328 - protein, 10 aa, Homo sapiens
EILQLPNGAL

SEQ ID NO: 10329 - protein, 9 aa, Homo sapiens
EIQGNINKV

SEQ ID NO: 10330 - protein, 9 aa, Homo sapiens
EIRTVLEKL

SEQ ID NO: 10331 - protein, 9 aa, Homo sapiens
ELANLAAFL

SEQ ID NO: 10332 - protein, 9 aa, Homo sapiens
ELKDRDKEL

SEQ ID NO: 10333 - protein, 9 aa, Homo sapiens
ELMQLEKEL

SEQ ID NO: 10334 - protein, 10 aa, Homo sapiens
ELSKGQAKKL

SEQ ID NO: 10335 - protein, 9 aa, Homo sapiens
EMDDLKLYL

SEQ ID NO: 10336 - protein, 9 aa, Homo sapiens
EVGMLHQQV

SEQ ID NO: 10337 - protein, 9 aa, Homo sapiens
EVKALNANL

SEQ ID NO: 10338 - protein, 10 aa, Homo sapiens
FIILGALLLL

SEQ ID NO: 10339 - protein, 9 aa, Homo sapiens
FLEMCNDLL

SEQ ID NO: 10340 - protein, 9 aa, Homo sapiens
FLFIFFFLL

SEQ ID NO: 10341 - protein, 10 aa, Homo sapiens
FLIVMHRSLV

SEQ ID NO: 10342 - protein, 9 aa, Homo sapiens
FLSRQLESL

SEQ ID NO: 10343 - protein, 9 aa, Homo sapiens
GIKAVDAPV

SEQ ID NO: 10344 - protein, 10 aa, Homo sapiens
GIKLSAIPVV

SEQ ID NO: 10345 - protein, 9 aa, Homo sapiens
GLDALKVTV

SEQ ID NO: 10346 - protein, 10 aa, Homo sapiens
GLDTFSGFKV

SEQ ID NO: 10347 - protein, 10 aa, Homo sapiens
GLQDFDLIRV

SEQ ID NO: 10348 - protein, 9 aa, Homo sapiens
GLRTIVTTL

SEQ ID NO: 10349 - protein, 9 aa, Homo sapiens
GLSPLLQKI

SEQ ID NO: 10350 - protein, 10 aa, Homo sapiens
GLSSPIYIDL

SEQ ID NO: 10351 - protein, 9 aa, Homo sapiens
GQYTDLLRL

SEQ ID NO: 10352 - protein, 9 aa, Homo sapiens
GVLPFVRGV

SEQ ID NO: 10353 - protein, 9 aa, Homo sapiens
HLEEQIAKV

SEQ ID NO: 10354 - protein, 9 aa, Homo sapiens
HLLQYNHRV

SEQ ID NO: 10355 - protein, 9 aa, Homo sapiens
HVCHINRIL

SEQ ID NO: 10356 - protein, 9 aa, Homo sapiens
IILEILLLL

SEQ ID NO: 10357 - protein, 10 aa, Homo sapiens
ILAPCKLETV

SEQ ID NO: 10358 - protein, 10 aa, Homo sapiens
ILDEQAVQGL

SEQ ID NO: 10359 - protein, 10 aa, Homo sapiens
ILLQIDNARL

SEQ ID NO: 10360 - protein, 10 aa, Homo sapiens
ILNEDGSPNL

SEQ ID NO: 10361 - protein, 9 aa, Homo sapiens
ILSKCNIQV

SEQ ID NO: 10362 - protein, 9 aa, Homo sapiens
KILPTPETV

SEQ ID NO: 10363 - protein, 9 aa, Homo sapiens
KINNEIRSV

SEQ ID NO: 10364 - protein, 9 aa, Homo sapiens
KISEEQQQL

SEQ ID NO: 10365 - protein, 9 aa, Homo sapiens
KISVIVETV

SEQ ID NO: 10366 - protein, 9 aa, Homo sapiens
KLDETGVAL

SEQ ID NO: 10367 - protein, 9 aa, Homo sapiens
KLDIISPQL

SEQ ID NO: 10368 - protein, 9 aa, Homo sapiens
KLEEKGVYV

SEQ ID NO: 10369 - protein, 9 aa, Homo sapiens
KLEGVLAEV

SEQ ID NO: 10370 - protein, 9 aa, Homo sapiens
KLFDSLTLL

SEQ ID NO: 10371 - protein, 10 aa, Homo sapiens
KLFQSNDPTL

SEQ ID NO: 10372 - protein, 9 aa, Homo sapiens
KLLEAISSL

SEQ ID NO: 10373 - protein, 10 aa, Homo sapiens
KLLEGEESRL

SEQ ID NO: 10374 - protein, 10 aa, Homo sapiens
KLLGLDVPSL

SEQ ID NO: 10375 - protein, 10 aa, Homo sapiens
KLQDAEIARL

SEQ ID NO: 10376 - protein, 9 aa, Homo sapiens
KLQEQVTDL

SEQ ID NO: 10377 - protein, 9 aa, Homo sapiens
KLQQLFIEL

SEQ ID NO: 10378 - protein, 9 aa, Homo sapiens
KLWPEASKV

SEQ ID NO: 10379 - protein, 9 aa, Homo sapiens
KMDDKALLV

SEQ ID NO: 10380 - protein, 9 aa, Homo sapiens
KVENLVDQL

SEQ ID NO: 10381 - protein, 9 aa, Homo sapiens
KVIDQQNGL

SEQ ID NO: 10382 - protein, 9 aa, Homo sapiens
KVLHHTAKL

SEQ ID NO: 10383 - protein, 9 aa, Homo sapiens
LITRNLQEV

SEQ ID NO: 10384 - protein, 9 aa, Homo sapiens
LLAEENQRL

SEQ ID NO: 10385 - protein, 9 aa, Homo sapiens
LLDTVLPHL

SEQ ID NO: 10386 - protein, 10 aa, Homo sapiens
LLFLLSQNRV

SEQ ID NO: 10387 - protein, 10 aa, Homo sapiens
LLGVGNNLLV

SEQ ID NO: 10388 - protein, 10 aa, Homo sapiens
LLLQHGGPVL

SEQ ID NO: 10389 - protein, 10 aa, Homo sapiens
LLNAGEIPNL

SEQ ID NO: 10390 - protein, 9 aa, Homo sapiens
LLNEDLEKV

SEQ ID NO: 10391 - protein, 9 aa, Homo sapiens
LLQCTRNIL

SEQ ID NO: 10392 - protein, 9 aa, Homo sapiens
LLQEEKLLL

SEQ ID NO: 10393 - protein, 9 aa, Homo sapiens
LLSDKDLTV

SEQ ID NO: 10394 - protein, 9 aa, Homo sapiens
LLYSGRTIL

SEQ ID NO: 10395 - protein, 9 aa, Homo sapiens
LVEINKILL

SEQ ID NO: 10396 - protein, 9 aa, Homo sapiens
MVCYTAQTL

SEQ ID NO: 10397 - protein, 9 aa, Homo sapiens
NIIPYITNV

SEQ ID NO: 10398 - protein, 10 aa, Homo sapiens
NLLEKDYFGL

SEQ ID NO: 10399 - protein, 9 aa, Homo sapiens
NLLHHPKLL

SEQ ID NO: 10400 - protein, 9 aa, Homo sapiens
PLRTKVAKL

SEQ ID NO: 10401 - protein, 9 aa, Homo sapiens
QIGRENPQL

SEQ ID NO: 10402 - protein, 9 aa, Homo sapiens
QINEQVEKL

SEQ ID NO: 10403 - protein, 9 aa, Homo sapiens
QIPPVSTPV

SEQ ID NO: 10404 - protein, 9 aa, Homo sapiens
QIQEKLQQL

SEQ ID NO: 10405 - protein, 9 aa, Homo sapiens
QLENLIEKL

SEQ ID NO: 10406 - protein, 9 aa, Homo sapiens
QLFKFDMNV

SEQ ID NO: 10407 - protein, 9 aa, Homo sapiens
QLKKELNEL

SEQ ID NO: 10408 - protein, 9 aa, Homo sapiens
QMVKGMLQL

SEQ ID NO: 10409 - protein, 10 aa, Homo sapiens
QVNAVTVLTL

SEQ ID NO: 10410 - protein, 10 aa, Homo sapiens
QVTVPPKKPV

SEQ ID NO: 10411 - protein, 10 aa, Homo sapiens
RIIGLKPEGV

SEQ ID NO: 10412 - protein, 9 aa, Homo sapiens
RLAADDFRV

SEQ ID NO: 10413 - protein, 9 aa, Homo sapiens
RLAAMLRQL

SEQ ID NO: 10414 - protein, 9 aa, Homo sapiens
RLAEVELRL

SEQ ID NO: 10415 - protein, 9 aa, Homo sapiens
RLAQGLTHL

SEQ ID NO: 10416 - protein, 9 aa, Homo sapiens
RLEEGIRFL

SEQ ID NO: 10417 - protein, 9 aa, Homo sapiens
RLKEENEKL

SEQ ID NO: 10418 - protein, 10 aa, Homo sapiens
RLLEGEDAHL

SEQ ID NO: 10419 - protein, 9 aa, Homo sapiens
RLLNFQRQL

SEQ ID NO: 10420 - protein, 9 aa, Homo sapiens
RLQEENQQL

SEQ ID NO: 10421 - protein, 10 aa, Homo sapiens
RLSQLEGVNV

SEQ ID NO: 10422 - protein, 10 aa, Homo sapiens
RLVGIHELFL

SEQ ID NO: 10423 - protein, 10 aa, Homo sapiens
RMFADDLHNL

SEQ ID NO: 10424 - protein, 9 aa, Homo sapiens
RQPDLVLRL

SEQ ID NO: 10425 - protein, 10 aa, Homo sapiens
RVIEKEIKDV

SEQ ID NO: 10426 - protein, 10 aa, Homo sapiens
SIDGVQQISL

SEQ ID NO: 10427 - protein, 9 aa, Homo sapiens
SLADFEKAL

SEQ ID NO: 10428 - protein, 9 aa, Homo sapiens
SLAKKCMAV

SEQ ID NO: 10429 - protein, 10 aa, Homo sapiens
SLAPDTRLFV

SEQ ID NO: 10430 - protein, 9 aa, Homo sapiens
SLAVSSPRL

SEQ ID NO: 10431 - protein, 9 aa, Homo sapiens
SLDDHVVAV

SEQ ID NO: 10432 - protein, 9 aa, Homo sapiens
SLDKDIVAL

SEQ ID NO: 10433 - protein, 9 aa, Homo sapiens
SLDKTSHSL

SEQ ID NO: 10434 - protein, 10 aa, Homo sapiens
SLIDIILISL

SEQ ID NO: 10435 - protein, 9 aa, Homo sapiens
SLIDQFFGV

SEQ ID NO: 10436 - protein, 9 aa, Homo sapiens
SLKEIVINV

SEQ ID NO: 10437 - protein, 9 aa, Homo sapiens
SLKPEVAQV

SEQ ID NO: 10438 - protein, 9 aa, Homo sapiens
SLSESWYNL

SEQ ID NO: 10439 - protein, 9 aa, Homo sapiens
SLVDIYSQL

SEQ ID NO: 10440 - protein, 10 aa, Homo sapiens
SLVEGEALHL

SEQ ID NO: 10441 - protein, 9 aa, Homo sapiens
SLYDQAEKL

SEQ ID NO: 10442 - protein, 9 aa, Homo sapiens
SVRSIVTTL

SEQ ID NO: 10443 - protein, 10 aa, Homo sapiens
TLTGKNVLIV

SEQ ID NO: 10444 - protein, 9 aa, Homo sapiens
TLWDIQKDL

SEQ ID NO: 10445 - protein, 9 aa, Homo sapiens
TVAENVYRL

SEQ ID NO: 10446 - protein, 9 aa, Homo sapiens
TVILEIPEL

SEQ ID NO: 10447 - protein, 10 aa, Homo sapiens
TVLTSALSPV

SEQ ID NO: 10448 - protein, 9 aa, Homo sapiens
TVMNTIQQL

SEQ ID NO: 10449 - protein, 9 aa, Homo sapiens
VLDSKSVEV

SEQ ID NO: 10450 - protein, 10 aa, Homo sapiens
VLFTGREFFV

SEQ ID NO: 10451 - protein, 9 aa, Homo sapiens
YIDDVFHAL

SEQ ID NO: 10452 - protein, 10 aa, Homo sapiens
YILDCNGIAV

SEQ ID NO: 10453 - protein, 9 aa, Homo sapiens
YLDKTFYNL

SEQ ID NO: 10454 - protein, 10 aa, Homo sapiens
YLITGNLEKL

SEQ ID NO: 10455 - protein, 10 aa, Homo sapiens
YLLILKACVV

SEQ ID NO: 10456 - protein, 9 aa, Homo sapiens
YLQIHPQEL

SEQ ID NO: 10457 - protein, 10 aa, Homo sapiens
YLSDEGHYWV

SEQ ID NO: 10458 - protein, 11 aa, Homo sapiens
HEQLSVAEITN

SEQ ID NO: 10459 - protein, 9 aa, Homo sapiens
CLGHNHKEV

SEQ ID NO: 10460 - protein, 10 aa, Homo sapiens
KIADPICTFI

SEQ ID NO: 10461 - protein, 10 aa, Homo sapiens
KMYAFTLESV

SEQ ID NO: 10462 - protein, 10 aa, Homo sapiens
LLIDLTSFLL

SEQ ID NO: 10463 - protein, 10 aa, Homo sapiens
VMIIVSSLAV

SEQ ID NO: 10464 - protein, 9 aa, Homo sapiens
FILPVLGAV

SEQ ID NO: 10465 - protein, 9 aa, Homo sapiens
AAAAVIPTV

SEQ ID NO: 10466 - protein, 9 aa, Homo sapiens
AILPTSIFL

SEQ ID NO: 10467 - protein, 9 aa, Homo sapiens
AIMENANVL

SEQ ID NO: 10468 - protein, 9 aa, Homo sapiens
ALAKIEIKL

SEQ ID NO: 10469 - protein, 9 aa, Homo sapiens
ALDGLLQQV

SEQ ID NO: 10470 - protein, 9 aa, Homo sapiens
ALDTTRHEL

SEQ ID NO: 10471 - protein, 9 aa, Homo sapiens
ALGPGVPHI

SEQ ID NO: 10472 - protein, 11 aa, Homo sapiens
ALLGGNVRMML

SEQ ID NO: 10473 - protein, 9 aa, Homo sapiens
ALLPQNHKL

SEQ ID NO: 10474 - protein, 9 aa, Homo sapiens
ALLQQPLFL

SEQ ID NO: 10475 - protein, 9 aa, Homo sapiens
ALVNVQIPL

SEQ ID NO: 10476 - protein, 9 aa, Homo sapiens
ALYHFNHSL

SEQ ID NO: 10477 - protein, 9 aa, Homo sapiens
ALYSELLAV

SEQ ID NO: 10478 - protein, 9 aa, Homo sapiens
FAYPAIRYL

SEQ ID NO: 10479 - protein, 9 aa, Homo sapiens
FLAGAVTSV

SEQ ID NO: 10480 - protein, 11 aa, Homo sapiens
FLAPDNSLLLA

SEQ ID NO: 10481 - protein, 9 aa, Homo sapiens
FLFGYPKRL

SEQ ID NO: 10482 - protein, 9 aa, Homo sapiens
FLIPIYHQV

SEQ ID NO: 10483 - protein, 12 aa, Homo sapiens
FLIQDQQGLITL

SEQ ID NO: 10484 - protein, 10 aa, Homo sapiens
FLLPTGLSSL

SEQ ID NO: 10485 - protein, 11 aa, Homo sapiens
FLLRVGADPAL

SEQ ID NO: 10486 - protein, 9 aa, Homo sapiens
FLPAGIVAV

SEQ ID NO: 10487 - protein, 9 aa, Homo sapiens
FLTDREVRL

SEQ ID NO: 10488 - protein, 9 aa, Homo sapiens
FLTGVTTEL

SEQ ID NO: 10489 - protein, 10 aa, Homo sapiens
FLYNEALYSL

SEQ ID NO: 10490 - protein, 9 aa, Homo sapiens
FVFSFPVSV

SEQ ID NO: 10491 - protein, 9 aa, Homo sapiens
FVRDMIREV

SEQ ID NO: 10492 - protein, 9 aa, Homo sapiens
GLASVVQAL

SEQ ID NO: 10493 - protein, 9 aa, Homo sapiens
GLAVILPPL

SEQ ID NO: 10494 - protein, 9 aa, Homo sapiens
GLDSYLPEL

SEQ ID NO: 10495 - protein, 9 aa, Homo sapiens
GLDTVVALL

SEQ ID NO: 10496 - protein, 9 aa, Homo sapiens
GLIENPALL

SEQ ID NO: 10497 - protein, 9 aa, Homo sapiens
GLKGRVFEV

SEQ ID NO: 10498 - protein, 9 aa, Homo sapiens
GLKHDIARV

SEQ ID NO: 10499 - protein, 10 aa, Homo sapiens
GLLESGRHYL

SEQ ID NO: 10500 - protein, 9 aa, Homo sapiens
GLLPKLTAL

SEQ ID NO: 10501 - protein, 12 aa, Homo sapiens
GLMDEKLLHNVL

SEQ ID NO: 10502 - protein, 9 aa, Homo sapiens
GLPELVIQL

SEQ ID NO: 10503 - protein, 10 aa, Homo sapiens
GMFKNLLKEV

SEQ ID NO: 10504 - protein, 11 aa, Homo sapiens
HVYDGKFLARV

SEQ ID NO: 10505 - protein, 9 aa, Homo sapiens
IAPPVPLKA

SEQ ID NO: 10506 - protein, 9 aa, Homo sapiens
IIENIVAVT

SEQ ID NO: 10507 - protein, 10 aa, Homo sapiens
IIHEIAVLEL

SEQ ID NO: 10508 - protein, 9 aa, Homo sapiens
ILDHEVPSL

SEQ ID NO: 10509 - protein, 10 aa, Homo sapiens
ILFDHMVPLV

SEQ ID NO: 10510 - protein, 10 aa, Homo sapiens
ILHEIAVLEL

SEQ ID NO: 10511 - protein, 11 aa, Homo sapiens
ILLDDTGLAYI

SEQ ID NO: 10512 - protein, 9 aa, Homo sapiens
IVAEIIKKV

SEQ ID NO: 10513 - protein, 9 aa, Homo sapiens
KIKEIAVTV

SEQ ID NO: 10514 - protein, 9 aa, Homo sapiens
KIVDLLKNL

SEQ ID NO: 10515 - protein, 9 aa, Homo sapiens
KLMAPDISL

SEQ ID NO: 10516 - protein, 9 aa, Homo sapiens
KVQEQVHKV

SEQ ID NO: 10517 - protein, 9 aa, Homo sapiens
LAGTALAAL

SEQ ID NO: 10518 - protein, 10 aa, Homo sapiens
LIKEVDIYTV

SEQ ID NO: 10519 - protein, 9 aa, Homo sapiens
LILGKLHYV

SEQ ID NO: 10520 - protein, 9 aa, Homo sapiens
LLLAATPGL

SEQ ID NO: 10521 - protein, 9 aa, Homo sapiens
LLLDVPTAA

SEQ ID NO: 10522 - protein, 10 aa, Homo sapiens
LLLSAEPVPA

SEQ ID NO: 10523 - protein, 9 aa, Homo sapiens
LLQDIILQV

SEQ ID NO: 10524 - protein, 11 aa, Homo sapiens
LMWELEKKSAV

SEQ ID NO: 10525 - protein, 9 aa, Homo sapiens
MAPARLFAL

SEQ ID NO: 10526 - protein, 11 aa, Homo sapiens
NIASIGSTIFL

SEQ ID NO: 10527 - protein, 11 aa, Homo sapiens
QLLPQGIVPAL

SEQ ID NO: 10528 - protein, 9 aa, Homo sapiens
RLIDRIKTV

SEQ ID NO: 10529 - protein, 9 aa, Homo sapiens
RLSPVSPAL

SEQ ID NO: 10530 - protein, 9 aa, Homo sapiens
SIAPRMMSV

SEQ ID NO: 10531 - protein, 9 aa, Homo sapiens
SIIPPLFTV

SEQ ID NO: 10532 - protein, 9 aa, Homo sapiens
SLASFIPAV

SEQ ID NO: 10533 - protein, 9 aa, Homo sapiens
SLLGGVLRV

SEQ ID NO: 10534 - protein, 9 aa, Homo sapiens
SLLRDVPLA

SEQ ID NO: 10535 - protein, 9 aa, Homo sapiens
SLSHLVPAL

SEQ ID NO: 10536 - protein, 9 aa, Homo sapiens
SLTSVVLTL

SEQ ID NO: 10537 - protein, 9 aa, Homo sapiens
SMHQILLYL

SEQ ID NO: 10538 - protein, 12 aa, Homo sapiens
SMMGPSPGPPSV

SEQ ID NO: 10539 - protein, 9 aa, Homo sapiens
SQIPAQPSV

SEQ ID NO: 10540 - protein, 9 aa, Homo sapiens
SVGSRPPAV

SEQ ID NO: 10541 - protein, 9 aa, Homo sapiens
TILKRLFRV

SEQ ID NO: 10542 - protein, 9 aa, Homo sapiens
TLAAIAVHL

SEQ ID NO: 10543 - protein, 9 aa, Homo sapiens
TLFGLTPTL

SEQ ID NO: 10544 - protein, 9 aa, Homo sapiens
TLFPRRIFL

SEQ ID NO: 10545 - protein, 9 aa, Homo sapiens
TLGDAHIYL

SEQ ID NO: 10546 - protein, 9 aa, Homo sapiens
TLSPRPPLI

SEQ ID NO: 10547 - protein, 9 aa, Homo sapiens
TLSSLVFQL

SEQ ID NO: 10548 - protein, 9 aa, Homo sapiens
VLQRSLVTV

SEQ ID NO: 10549 - protein, 9 aa, Homo sapiens
VMFKTPVSI

SEQ ID NO: 10550 - protein, 9 aa, Homo sapiens
YANAKIYKL

SEQ ID NO: 10551 - protein, 9 aa, Homo sapiens
YIYKDTIQV

SEQ ID NO: 10552 - protein, 9 aa, Homo sapiens
YLDRLIPQA

SEQ ID NO: 10553 - protein, 9 aa, Homo sapiens
YLFGRNPDL

SEQ ID NO: 10554 - protein, 9 aa, Homo sapiens
YLIASIDHL

SEQ ID NO: 10555 - protein, 12 aa, Homo sapiens
YLIGLDPENLAL

SEQ ID NO: 10556 - protein, 9 aa, Homo sapiens
YLLEKFVAV

SEQ ID NO: 10557 - protein, 10 aa, Homo sapiens
YLNDLHEVLL

SEQ ID NO: 10558 - protein, 9 aa, Homo sapiens
YLSNVDVYL

SEQ ID NO: 10559 - protein, 9 aa, Homo sapiens
YLYDRLLRI

SEQ ID NO: 10560 - protein, 9 aa, Human alphaherpesvirus 3
FLMEDQTLL

SEQ ID NO: 10561 - protein, 9 aa, Homo sapiens
SAFATPFLV

SEQ ID NO: 10562 - protein, 9 aa, Influenza A virus
GIEGFVFTL

SEQ ID NO: 10563 - protein, 8 aa, Homo sapiens
IIGRLLEV

SEQ ID NO: 10564 - protein, 9 aa, Trypanosoma cruzi
TLLEFVFKL

SEQ ID NO: 10565 - protein, 9 aa, Homo sapiens
YVTPVNRNV

SEQ ID NO: 10566 - protein, 9 aa, Homo sapiens
ALEPGPVTA

SEQ ID NO: 10567 - protein, 9 aa, Homo sapiens
YLEAGPVTA

SEQ ID NO: 10568 - protein, 9 aa, Homo sapiens
YLEPGAVTA

SEQ ID NO: 10569 - protein, 9 aa, Homo sapiens
YLEPGPATA

SEQ ID NO: 10570 - protein, 9 aa, Homo sapiens
YLEPGPVAA

SEQ ID NO: 10571 - protein, 9 aa, Influenza A virus (A/chicken/Anhui/1/1998(H9N2))
GILEFVFTL

SEQ ID NO: 10572 - protein, 9 aa, Influenza A virus (A/England/10/67(H2N2))
GILGFIFTL

SEQ ID NO: 10573 - protein, 9 aa, Influenza A virus (A/New South Wales/15/1999(H3N2))
GILGFVYTL

SEQ ID NO: 10574 - protein, 9 aa, Influenza A virus (A/Canterbury/236/2005(H3N2))
GILGLVFTL

SEQ ID NO: 10575 - protein, 9 aa, Influenza A virus (A/Cameron/1946(H1N1))
GILGVVFTL

SEQ ID NO: 10576 - protein, 9 aa, Influenza A virus (A/bar-headed goose/Qinghai/3/2005(H5N1))
GIWGFVFTL

SEQ ID NO: 10577 - protein, 9 aa, Influenza A virus (A/duck/Fujian/13/2002(H5N1))
GTLGFVFTL

SEQ ID NO: 10578 - protein, 9 aa, Influenza A virus (A/Hanoi/TN405/2005(H3N2))
GVLGFVFTL

SEQ ID NO: 10579 - protein, 9 aa, Influenza A virus (A/swine/Guangdong/01/2005(H3N2))
WILGFVFTL

SEQ ID NO: 10580 - protein, 9 aa, Human alphaherpesvirus 1
ALHTALATV

SEQ ID NO: 10581 - protein, 9 aa, Herpes simplex virus (type 1 / strain 17)
ALSALLTKL

SEQ ID NO: 10582 - protein, 9 aa, Herpes simplex virus (type 1 / strain 17)
FLTCTDRSV

SEQ ID NO: 10583 - protein, 9 aa, Homo sapiens
AWLVAAAEI

SEQ ID NO: 10584 - protein, 9 aa, Homo sapiens
KLVMSQANV

SEQ ID NO: 10585 - protein, 9 aa, Homo sapiens
MPGEATETV

SEQ ID NO: 10586 - protein, 9 aa, Homo sapiens
SQQAQLAAA

SEQ ID NO: 10587 - protein, 9 aa, Human metapneumovirus
FQANTPPAV

SEQ ID NO: 10588 - protein, 9 aa, Hepatitis C virus subtype 3a
LYPSLIFDI

SEQ ID NO: 10589 - protein, 10 aa, Hepatitis C virus subtype 3a
VLDDHYKTAL

SEQ ID NO: 10590 - protein, 10 aa, Plasmodium falciparum 3D7
FLFVEALFQE

SEQ ID NO: 10591 - protein, 10 aa, Plasmodium falciparum 3D7
SVFNVVNSSI

SEQ ID NO: 10592 - protein, 10 aa, Plasmodium falciparum 3D7
SVSSFLFVEA

SEQ ID NO: 10593 - protein, 9 aa, Homo sapiens
AILKYIETL

SEQ ID NO: 10594 - protein, 9 aa, Homo sapiens
ALAATVFCV

SEQ ID NO: 10595 - protein, 9 aa, Homo sapiens
ALASLENHV

SEQ ID NO: 10596 - protein, 9 aa, Homo sapiens
ALDANIARL

SEQ ID NO: 10597 - protein, 9 aa, Homo sapiens
ALDDIIYRA

SEQ ID NO: 10598 - protein, 9 aa, Homo sapiens
ALDGKIYEL

SEQ ID NO: 10599 - protein, 8 aa, Homo sapiens
ALGNVRTV

SEQ ID NO: 10600 - protein, 9 aa, Homo sapiens
ALKKQLPGV

SEQ ID NO: 10601 - protein, 9 aa, Homo sapiens
ALKNGQYWV

SEQ ID NO: 10602 - protein, 10 aa, Homo sapiens
ALLESSLRQA

SEQ ID NO: 10603 - protein, 10 aa, Homo sapiens
ALPTVSPPGV

SEQ ID NO: 10604 - protein, 9 aa, Homo sapiens
ALRVFVESV

SEQ ID NO: 10605 - protein, 11 aa, Homo sapiens
ALSNSDVIRQV

SEQ ID NO: 10606 - protein, 9 aa, Homo sapiens
ALVDCSVAL

SEQ ID NO: 10607 - protein, 10 aa, Homo sapiens
ALWGFFPVLL

SEQ ID NO: 10608 - protein, 10 aa, Homo sapiens
ALWKGRPLSV

SEQ ID NO: 10609 - protein, 11 aa, Homo sapiens
AMFESSQNVLL

SEQ ID NO: 10610 - protein, 9 aa, Homo sapiens
ATADYICKV

SEQ ID NO: 10611 - protein, 9 aa, Homo sapiens
FAHPSLWQL

SEQ ID NO: 10612 - protein, 9 aa, Homo sapiens
FFMERSWSV

SEQ ID NO: 10613 - protein, 9 aa, Homo sapiens
FGLARAFGV

SEQ ID NO: 10614 - protein, 9 aa, Homo sapiens
FIHQHFVEV

SEQ ID NO: 10615 - protein, 9 aa, Homo sapiens
FLDKNNDLL

SEQ ID NO: 10616 - protein, 9 aa, Homo sapiens
FLIDRSPEY

SEQ ID NO: 10617 - protein, 9 aa, Homo sapiens
FLKEKVPGI

SEQ ID NO: 10618 - protein, 9 aa, Homo sapiens
FLLDHGASL

SEQ ID NO: 10619 - protein, 9 aa, Homo sapiens
FLPASLRSV

SEQ ID NO: 10620 - protein, 9 aa, Toxoplasma gondii ME49
FMHGKIPTL

SEQ ID NO: 10621 - protein, 9 aa, Homo sapiens
FSFPVSVGV

SEQ ID NO: 10622 - protein, 9 aa, Homo sapiens
FTQDSNYLL

SEQ ID NO: 10623 - protein, 9 aa, Homo sapiens
FVIRNIVEA

SEQ ID NO: 10624 - protein, 8 aa, Homo sapiens
GLGRVWAV

SEQ ID NO: 10625 - protein, 9 aa, Homo sapiens
GLSNLTHVL

SEQ ID NO: 10626 - protein, 10 aa, Homo sapiens
GLWHGMFANV

SEQ ID NO: 10627 - protein, 9 aa, Homo sapiens
GLYPKVAKI

SEQ ID NO: 10628 - protein, 9 aa, Homo sapiens
HLAEHSLQV

SEQ ID NO: 10629 - protein, 9 aa, Homo sapiens
HLAVVAPRL

SEQ ID NO: 10630 - protein, 9 aa, Homo sapiens
HLTYLNVYL

SEQ ID NO: 10631 - protein, 9 aa, Homo sapiens
ILDDACMNV

SEQ ID NO: 10632 - protein, 9 aa, Homo sapiens
ILDSRLIAA

SEQ ID NO: 10633 - protein, 8 aa, Homo sapiens
ILHDVVEV

SEQ ID NO: 10634 - protein, 9 aa, Homo sapiens
ILHTDVVYL

SEQ ID NO: 10635 - protein, 9 aa, Homo sapiens
ILPERFLAV

SEQ ID NO: 10636 - protein, 9 aa, Homo sapiens
IVNGHTLLV

SEQ ID NO: 10637 - protein, 9 aa, Homo sapiens
KASEKILQV

SEQ ID NO: 10638 - protein, 11 aa, Homo sapiens
KIWEELSVLEV

SEQ ID NO: 10639 - protein, 9 aa, Homo sapiens
KLDDYVYYV

SEQ ID NO: 10640 - protein, 10 aa, Homo sapiens
KLLDKPEQFL

SEQ ID NO: 10641 - protein, 11 aa, Homo sapiens
KMDASLGNLFA

SEQ ID NO: 10642 - protein, 11 aa, Homo sapiens
KMVDGVGVCTV

SEQ ID NO: 10643 - protein, 9 aa, Homo sapiens
KSIARVLTV

SEQ ID NO: 10644 - protein, 9 aa, Homo sapiens
KTLGKLWRL

SEQ ID NO: 10645 - protein, 9 aa, Homo sapiens
KTTTIAVEV

SEQ ID NO: 10646 - protein, 10 aa, Homo sapiens
KTWDQVPFSV

SEQ ID NO: 10647 - protein, 9 aa, Homo sapiens
KVADGLVKV

SEQ ID NO: 10648 - protein, 9 aa, Homo sapiens
KVLEHVVRV

SEQ ID NO: 10649 - protein, 10 aa, Homo sapiens
LILEKQPAYV

SEQ ID NO: 10650 - protein, 9 aa, Homo sapiens
LLAEKVEQL

SEQ ID NO: 10651 - protein, 9 aa, Homo sapiens
LLAPKLNEA

SEQ ID NO: 10652 - protein, 9 aa, Homo sapiens
LLDLIQTKV

SEQ ID NO: 10653 - protein, 10 aa, Homo sapiens
LLFGKIGYYL

SEQ ID NO: 10654 - protein, 8 aa, Homo sapiens
LLGSAHEV

SEQ ID NO: 10655 - protein, 11 aa, Homo sapiens
LLMEKEDYHSL

SEQ ID NO: 10656 - protein, 9 aa, Homo sapiens
LLNAILHSA

SEQ ID NO: 10657 - protein, 9 aa, Homo sapiens
LLWGDLIWL

SEQ ID NO: 10658 - protein, 10 aa, Homo sapiens
LLYDFQLINV

SEQ ID NO: 10659 - protein, 9 aa, Homo sapiens
LQSDVTCQV

SEQ ID NO: 10660 - protein, 9 aa, Homo sapiens
LTFPVRDGV

SEQ ID NO: 10661 - protein, 9 aa, Homo sapiens
LYLGLFNRL

SEQ ID NO: 10662 - protein, 9 aa, Homo sapiens
LYPQFMFHL

SEQ ID NO: 10663 - protein, 9 aa, Homo sapiens
MVLPLLIFV

SEQ ID NO: 10664 - protein, 9 aa, Homo sapiens
QLEERTWLL

SEQ ID NO: 10665 - protein, 9 aa, Homo sapiens
QQNPRLVYV

SEQ ID NO: 10666 - protein, 11 aa, Homo sapiens
RLLQETMYMTV

SEQ ID NO: 10667 - protein, 9 aa, Homo sapiens
RLYSVSYLL

SEQ ID NO: 10668 - protein, 9 aa, Homo sapiens
RQFLFHWTV

SEQ ID NO: 10669 - protein, 10 aa, Homo sapiens
SAWISKPPGV

SEQ ID NO: 10670 - protein, 9 aa, Homo sapiens
SILADRILL

SEQ ID NO: 10671 - protein, 9 aa, Homo sapiens
SISAGIPKV

SEQ ID NO: 10672 - protein, 11 aa, Homo sapiens
SLADTNSLAVV

SEQ ID NO: 10673 - protein, 9 aa, Homo sapiens
SLAELIQAL

SEQ ID NO: 10674 - protein, 11 aa, Homo sapiens
SLDDYNHLVTL

SEQ ID NO: 10675 - protein, 9 aa, Homo sapiens
SLDEKPRIV

SEQ ID NO: 10676 - protein, 9 aa, Homo sapiens
SLFGNIKGA

SEQ ID NO: 10677 - protein, 9 aa, Homo sapiens
SLFSGKPEV

SEQ ID NO: 10678 - protein, 9 aa, Homo sapiens
SLHFLILYV

SEQ ID NO: 10679 - protein, 9 aa, Homo sapiens
SLIDGIKRA

SEQ ID NO: 10680 - protein, 9 aa, Homo sapiens
SLIHGLWNL

SEQ ID NO: 10681 - protein, 9 aa, Homo sapiens
SLLDNLLTI

SEQ ID NO: 10682 - protein, 9 aa, Homo sapiens
SLLNVVMDL

SEQ ID NO: 10683 - protein, 9 aa, Homo sapiens
SLLTSLVTA

SEQ ID NO: 10684 - protein, 9 aa, Homo sapiens
SLMKDFPGA

SEQ ID NO: 10685 - protein, 8 aa, Homo sapiens
SLMWTLLK

SEQ ID NO: 10686 - protein, 10 aa, Homo sapiens
SLQEEKLIYV

SEQ ID NO: 10687 - protein, 10 aa, Homo sapiens
SLSGVMLTDV

SEQ ID NO: 10688 - protein, 9 aa, Homo sapiens
SLSSLELFL

SEQ ID NO: 10689 - protein, 9 aa, Homo sapiens
SLSSLLVKL

SEQ ID NO: 10690 - protein, 9 aa, Homo sapiens
SLWKGLVGI

SEQ ID NO: 10691 - protein, 12 aa, Homo sapiens
SMLEEGKEPWTV

SEQ ID NO: 10692 - protein, 9 aa, Homo sapiens
SQFSGKITV

SEQ ID NO: 10693 - protein, 9 aa, Homo sapiens
SVALKGHSL

SEQ ID NO: 10694 - protein, 9 aa, Homo sapiens
SVIEQLFFV

SEQ ID NO: 10695 - protein, 9 aa, Homo sapiens
SVTSHIYQV

SEQ ID NO: 10696 - protein, 9 aa, Homo sapiens
TLAAVLQRI

SEQ ID NO: 10697 - protein, 9 aa, Homo sapiens
TLDEKVAEL

SEQ ID NO: 10698 - protein, 9 aa, Homo sapiens
TLLESIQHV

SEQ ID NO: 10699 - protein, 9 aa, Homo sapiens
TLLESIRQA

SEQ ID NO: 10700 - protein, 9 aa, Homo sapiens
TLLRALQAL

SEQ ID NO: 10701 - protein, 9 aa, Homo sapiens
TLSTVISKV

SEQ ID NO: 10702 - protein, 9 aa, Homo sapiens
TLVPMPVRV

SEQ ID NO: 10703 - protein, 9 aa, Homo sapiens
TLWYRAPEV

SEQ ID NO: 10704 - protein, 11 aa, Homo sapiens
TLWYRAPEVLL

SEQ ID NO: 10705 - protein, 9 aa, Toxoplasma gondii ME49
TLWYRPPEL

SEQ ID NO: 10706 - protein, 9 aa, Homo sapiens
VLFTITKTV

SEQ ID NO: 10707 - protein, 8 aa, Homo sapiens
VLGKIEKV

SEQ ID NO: 10708 - protein, 9 aa, Homo sapiens
VLGPKIEAV

SEQ ID NO: 10709 - protein, 9 aa, Homo sapiens
VLSECIEGV

SEQ ID NO: 10710 - protein, 10 aa, Homo sapiens
VLSSDGVWRV

SEQ ID NO: 10711 - protein, 12 aa, Homo sapiens
VLYRYGSFSVTL

SEQ ID NO: 10712 - protein, 9 aa, Homo sapiens
VMDAALLLI

SEQ ID NO: 10713 - protein, 10 aa, Homo sapiens
WLDPNETNEI

SEQ ID NO: 10714 - protein, 8 aa, Homo sapiens
YLGKVLEL

SEQ ID NO: 10715 - protein, 11 aa, Homo sapiens
YLMDINGKMWL

SEQ ID NO: 10716 - protein, 9 aa, Homo sapiens
YLPPGFLSA

SEQ ID NO: 10717 - protein, 10 aa, Homo sapiens
YLRGGAITEV

SEQ ID NO: 10718 - protein, 9 aa, Homo sapiens
YLSEKVLAA

SEQ ID NO: 10719 - protein, 9 aa, Homo sapiens
YLVYILNEL

SEQ ID NO: 10720 - protein, 9 aa, Homo sapiens
YVIELQHVV

SEQ ID NO: 10721 - protein, 10 aa, Toxoplasma gondii GT1
AILEYLTAEV

SEQ ID NO: 10722 - protein, 12 aa, Toxoplasma gondii GT1
ALAEPVTGVGEA

SEQ ID NO: 10723 - protein, 10 aa, Toxoplasma gondii GT1
ALLRLDDLFI

SEQ ID NO: 10724 - protein, 9 aa, Toxoplasma gondii GT1
ALPAVGMGA

SEQ ID NO: 10725 - protein, 12 aa, Toxoplasma gondii GT1
ALVEAFKAIQRA

SEQ ID NO: 10726 - protein, 9 aa, Homo sapiens
AQFEHTLLV

SEQ ID NO: 10727 - protein, 11 aa, Toxoplasma gondii GT1
AVPGDNVGFNV

SEQ ID NO: 10728 - protein, 14 aa, Toxoplasma gondii GT1
FANTIIEEADEAMN

SEQ ID NO: 10729 - protein, 18 aa, Homo sapiens
FGIVEGLMTTVINDISTL

SEQ ID NO: 10730 - protein, 18 aa, Toxoplasma gondii
FGLVEGLMTTVINDISTL

SEQ ID NO: 10731 - protein, 11 aa, Toxoplasma gondii GT1
FIMDEADEMLS

SEQ ID NO: 10732 - protein, 9 aa, Toxoplasma gondii GT1
FITLHVPLL

SEQ ID NO: 10733 - protein, 9 aa, Toxoplasma gondii GT1
FLALHILTA

SEQ ID NO: 10734 - protein, 12 aa, Toxoplasma gondii GT1
FLAQVIVLNHPG

SEQ ID NO: 10735 - protein, 10 aa, Toxoplasma gondii GT1
FLDELAKVFT

SEQ ID NO: 10736 - protein, 11 aa, Toxoplasma gondii GT1
FLFEDDTPKKP

SEQ ID NO: 10737 - protein, 12 aa, Toxoplasma gondii GT1
FLFEDDTPKKPK

SEQ ID NO: 10738 - protein, 12 aa, Toxoplasma gondii GT1
FLLDDLKQILVT

SEQ ID NO: 10739 - protein, 11 aa, Toxoplasma gondii ME49
FLLSTRAGGLG

SEQ ID NO: 10740 - protein, 9 aa, Toxoplasma gondii GT1
FLNTVEVRV

SEQ ID NO: 10741 - protein, 10 aa, Toxoplasma gondii GT1
FLNTVEVRVT

SEQ ID NO: 10742 - protein, 11 aa, Toxoplasma gondii GT1
FLNTVEVRVTG

SEQ ID NO: 10743 - protein, 10 aa, Toxoplasma gondii GT1
FLTNEGIEFL

SEQ ID NO: 10744 - protein, 12 aa, Toxoplasma gondii GT1
FLTNEGIEFLRT

SEQ ID NO: 10745 - protein, 12 aa, Toxoplasma gondii GT1
FMADETDLAGRS

SEQ ID NO: 10746 - protein, 11 aa, Toxoplasma gondii ME49
FMDPPAPETLM

SEQ ID NO: 10747 - protein, 17 aa, Toxoplasma gondii GT1
FRGLLAEARIVGACETF

SEQ ID NO: 10748 - protein, 9 aa, Toxoplasma gondii GT1
FVDTLKTLA

SEQ ID NO: 10749 - protein, 12 aa, Toxoplasma gondii GT1
FVLELEPEWTVK

SEQ ID NO: 10750 - protein, 10 aa, Homo sapiens
FVYPLDFART

SEQ ID NO: 10751 - protein, 9 aa, Prochlorococcus phage P-HM1
GGNGMLATI

SEQ ID NO: 10752 - protein, 14 aa, Toxoplasma gondii GT1
GILNFLTSVDEAMN

SEQ ID NO: 10753 - protein, 9 aa, Toxoplasma gondii ME49
GLDKQIQEL

SEQ ID NO: 10754 - protein, 10 aa, Homo sapiens
GLDNAGKTTI

SEQ ID NO: 10755 - protein, 10 aa, Toxoplasma gondii ME49
GLDNAGKTTL

SEQ ID NO: 10756 - protein, 9 aa, Homo sapiens
GLSAFLHAI

SEQ ID NO: 10757 - protein, 9 aa, Toxoplasma gondii GT1
GLVEGLMTT

SEQ ID NO: 10758 - protein, 10 aa, Toxoplasma gondii GT1
GLVEGLMTTV

SEQ ID NO: 10759 - protein, 10 aa, Toxoplasma gondii GT1
GMEEGEFSEA

SEQ ID NO: 10760 - protein, 11 aa, Toxoplasma gondii GT1
GQAPVDSLRPT

SEQ ID NO: 10761 - protein, 11 aa, Toxoplasma gondii GT1
GVIEEDLKAVV

SEQ ID NO: 10762 - protein, 18 aa, Toxoplasma gondii ME49
HIVGLDIFTGKINDISTI

SEQ ID NO: 10763 - protein, 9 aa, Toxoplasma gondii ME49
HLDATTVLS

SEQ ID NO: 10764 - protein, 11 aa, Toxoplasma gondii ME49
HLLDFPNIVIK

SEQ ID NO: 10765 - protein, 11 aa, Toxoplasma gondii GT1
HLLQTDASAQL

SEQ ID NO: 10766 - protein, 11 aa, Toxoplasma gondii GT1
HLMDEAVEVAK

SEQ ID NO: 10767 - protein, 18 aa, Homo sapiens
HLVGIDIFTGKINDISTL

SEQ ID NO: 10768 - protein, 9 aa, Toxoplasma gondii GT1
IIIDEIHLL

SEQ ID NO: 10769 - protein, 10 aa, Toxoplasma gondii GT1
ILFDSKLATI

SEQ ID NO: 10770 - protein, 11 aa, Toxoplasma gondii GT1
ILFDSKLATIR

SEQ ID NO: 10771 - protein, 11 aa, Toxoplasma gondii GT1
ILLELEAPIKI

SEQ ID NO: 10772 - protein, 12 aa, Toxoplasma gondii GT1
ILMDLEPGTMDS

SEQ ID NO: 10773 - protein, 11 aa, Toxoplasma gondii ME49
ILPDSLPLDTL

SEQ ID NO: 10774 - protein, 9 aa, Toxoplasma gondii GT1
ILTAQLIRL

SEQ ID NO: 10775 - protein, 17 aa, Toxoplasma gondii GT1
IRKLFNLSKDQDDEAMQ

SEQ ID NO: 10776 - protein, 9 aa, Crimean-Congo hemorrhagic fever orthonairovirus
ITNCLLSTA

SEQ ID NO: 10777 - protein, 9 aa, Eastern equine encephalitis virus
IVLGLIATA

SEQ ID NO: 10778 - protein, 9 aa, Human adenovirus 12
KDLVLLATI

SEQ ID NO: 10779 - protein, 9 aa, Toxoplasma gondii GT1
KLALPAVGM

SEQ ID NO: 10780 - protein, 11 aa, Toxoplasma gondii GT1
KLALPAVGMGA

SEQ ID NO: 10781 - protein, 12 aa, Toxoplasma gondii GT1
KLDESEQTLEVL

SEQ ID NO: 10782 - protein, 12 aa, Toxoplasma gondii GT1
KLEEIDDLLQLT

SEQ ID NO: 10783 - protein, 11 aa, Toxoplasma gondii GT1
KLFHLDSTLLA

SEQ ID NO: 10784 - protein, 9 aa, Toxoplasma gondii ME49
KLIVTSATL

SEQ ID NO: 10785 - protein, 9 aa, Toxoplasma gondii GT1
KLLADIPKA

SEQ ID NO: 10786 - protein, 10 aa, Toxoplasma gondii GT1
KLLDQIKQLK

SEQ ID NO: 10787 - protein, 12 aa, Toxoplasma gondii GT1
KLMQLLEEDTVA

SEQ ID NO: 10788 - protein, 9 aa, Mycobacterium phage Predator
KLNPMLAKA

SEQ ID NO: 10789 - protein, 12 aa, Toxoplasma gondii GT1
KVIDDVQQLEKD

SEQ ID NO: 10790 - protein, 9 aa, Enterobacteria phage RB43
KVLGLWATV

SEQ ID NO: 10791 - protein, 11 aa, Toxoplasma gondii GT1
KVVAEKGFTAA

SEQ ID NO: 10792 - protein, 9 aa, Toxoplasma gondii GT1
LALEQVADI

SEQ ID NO: 10793 - protein, 9 aa, Streptomyces phage mu1/6
LALPMPATA

SEQ ID NO: 10794 - protein, 16 aa, Toxoplasma gondii GT1
LGNPLSLSTLQDEAMQ

SEQ ID NO: 10795 - protein, 10 aa, Toxoplasma gondii GT1
LILEVQPHPS

SEQ ID NO: 10796 - protein, 11 aa, Toxoplasma gondii GT1
LILEVQPHPSV

SEQ ID NO: 10797 - protein, 9 aa, Toxoplasma gondii GT1
LLASLATSV

SEQ ID NO: 10798 - protein, 10 aa, Toxoplasma gondii GT1
LLDEHGHVRL

SEQ ID NO: 10799 - protein, 10 aa, Homo sapiens
LLGRIPSAVG

SEQ ID NO: 10800 - protein, 9 aa, Toxoplasma gondii GT1
LLLQQQQQL

SEQ ID NO: 10801 - protein, 18 aa, Toxoplasma gondii
LLTIEDGIFEVINDISTL

SEQ ID NO: 10802 - protein, 9 aa, Panine betaherpesvirus 2
LQLCCLATA

SEQ ID NO: 10803 - protein, 9 aa, Toxoplasma gondii GT1
LSLETVLNI

SEQ ID NO: 10804 - protein, 16 aa, Toxoplasma gondii
LVEGLMTTVINDISTL

SEQ ID NO: 10805 - protein, 9 aa, Spodoptera litura nucleopolyhedrovirus
LVLPILITI

SEQ ID NO: 10806 - protein, 9 aa, Enterobacteria phage VT2-Sakai
MGLPGVATV

SEQ ID NO: 10807 - protein, 9 aa, Bovine papular stomatitis virus
MGNGCLRIV

SEQ ID NO: 10808 - protein, 9 aa, Guanarito mammarenavirus
MINPLVITT

SEQ ID NO: 10809 - protein, 9 aa, Spodoptera litura nucleopolyhedrovirus II
NDFCCVATV

SEQ ID NO: 10810 - protein, 9 aa, Human metapneumovirus
NGVRVLATA

SEQ ID NO: 10811 - protein, 11 aa, Toxoplasma gondii ME49
NIQGITKPAIR

SEQ ID NO: 10812 - protein, 9 aa, Mupapillomavirus 1
NIVCPLCTL

SEQ ID NO: 10813 - protein, 10 aa, Toxoplasma gondii GT1
NLLSDLSVRL

SEQ ID NO: 10814 - protein, 14 aa, Toxoplasma gondii GT1
QFLSPVVLLDEAMQ

SEQ ID NO: 10815 - protein, 14 aa, Toxoplasma gondii ME49
QIQELIEATPYREQ

SEQ ID NO: 10816 - protein, 10 aa, Toxoplasma gondii GT1
QLNEEQKVQV

SEQ ID NO: 10817 - protein, 9 aa, Grass carp reovirus
RDVPMLITT

SEQ ID NO: 10818 - protein, 9 aa, Marek's disease herpesvirus strain GA
RGTPMVITV

SEQ ID NO: 10819 - protein, 9 aa, Toxoplasma gondii
RIINEPTAA

SEQ ID NO: 10820 - protein, 9 aa, Klebsiella phage phiKO2
RINAILATA

SEQ ID NO: 10821 - protein, 9 aa, Spodoptera frugiperda ascovirus 1a
RLNTVLATA

SEQ ID NO: 10822 - protein, 9 aa, Bovine papular stomatitis virus
RVNRLIIWV

SEQ ID NO: 10823 - protein, 9 aa, Enterobacteria phage IME08
SGDGLVATG

SEQ ID NO: 10824 - protein, 9 aa, Toxoplasma gondii
SLFDEEGAK

SEQ ID NO: 10825 - protein, 11 aa, Homo sapiens
SLFDEEGAKIV

SEQ ID NO: 10826 - protein, 11 aa, Toxoplasma gondii GT1
SLFEGIDYSVS

SEQ ID NO: 10827 - protein, 10 aa, Toxoplasma gondii ME49
SLGEWQGLTL

SEQ ID NO: 10828 - protein, 11 aa, Toxoplasma gondii GT1
SLLEHTDVAVM

SEQ ID NO: 10829 - protein, 17 aa, Toxoplasma gondii ME49
SLLGVDAVEKQLDEAMQ

SEQ ID NO: 10830 - protein, 19 aa, Toxoplasma gondii
SLLTIEDGIFEVINDISTL

SEQ ID NO: 10831 - protein, 9 aa, Toxoplasma gondii GT1
SLMTKGPST

SEQ ID NO: 10832 - protein, 12 aa, Toxoplasma gondii GT1
SLMTKGPSTQPM

SEQ ID NO: 10833 - protein, 12 aa, Toxoplasma gondii ME49
SLQDIIAILGMD

SEQ ID NO: 10834 - protein, 10 aa, Toxoplasma gondii GT1
SLQEDSIAKM

SEQ ID NO: 10835 - protein, 10 aa, Toxoplasma gondii ME49
TIMPKDIQLA

SEQ ID NO: 10836 - protein, 11 aa, Toxoplasma gondii GT1
TLLAAVRGEAA

SEQ ID NO: 10837 - protein, 9 aa, Toxoplasma gondii GT1
TLVEALDTM

SEQ ID NO: 10838 - protein, 10 aa, Toxoplasma gondii GT1
TLVEALDTME

SEQ ID NO: 10839 - protein, 12 aa, Toxoplasma gondii GT1
TLVEALDTMEAP

SEQ ID NO: 10840 - protein, 9 aa, Toxoplasma gondii GT1
TMLELLNQL

SEQ ID NO: 10841 - protein, 11 aa, Toxoplasma gondii ME49
TMLELLNQLDG

SEQ ID NO: 10842 - protein, 9 aa, Toxoplasma gondii GT1
TVVEIRNFL

SEQ ID NO: 10843 - protein, 11 aa, Toxoplasma gondii ME49
TVVPGGDLAKV

SEQ ID NO: 10844 - protein, 11 aa, Toxoplasma gondii GT1
VFLLLAPAPTF

SEQ ID NO: 10845 - protein, 9 aa, Homo sapiens
VLATLLNNL

SEQ ID NO: 10846 - protein, 11 aa, Toxoplasma gondii GT1
VLEEWLDTYAG

SEQ ID NO: 10847 - protein, 10 aa, Toxoplasma gondii ME49
VTIMPKDIQL

SEQ ID NO: 10848 - protein, 11 aa, Toxoplasma gondii ME49
VTIMPKDIQLA

SEQ ID NO: 10849 - protein, 10 aa, Toxoplasma gondii GT1
VTLSAHPLTL

SEQ ID NO: 10850 - protein, 12 aa, Toxoplasma gondii GT1
YLALPPHIFAPA

SEQ ID NO: 10851 - protein, 10 aa, Toxoplasma gondii GT1
YLDEGKVIKA

SEQ ID NO: 10852 - protein, 12 aa, Toxoplasma gondii GT1
YLFKEGVIVVQK

SEQ ID NO: 10853 - protein, 9 aa, Toxoplasma gondii ME49
YLGDGPKLV

SEQ ID NO: 10854 - protein, 9 aa, Toxoplasma gondii GT1
YLGKEVKEA

SEQ ID NO: 10855 - protein, 8 aa, Homo sapiens
YLGKTVQV

SEQ ID NO: 10856 - protein, 9 aa, Toxoplasma gondii GT1
YLLTAPVKA

SEQ ID NO: 10857 - protein, 12 aa, Toxoplasma gondii ME49
YLTAEVLELAGN

SEQ ID NO: 10858 - protein, 10 aa, Toxoplasma gondii GT1
YLYETPLETR

SEQ ID NO: 10859 - protein, 11 aa, Homo sapiens
YNFEKPFLWLA

SEQ ID NO: 10860 - protein, 9 aa, Homo sapiens
GLAARMSQV

SEQ ID NO: 10861 - protein, 9 aa, Homo sapiens
LLPPQPALA

SEQ ID NO: 10862 - protein, 9 aa, Homo sapiens
NLLEQFILL

SEQ ID NO: 10863 - protein, 9 aa, Homo sapiens
RMDGAVTSV

SEQ ID NO: 10864 - protein, 9 aa, Homo sapiens
RQLAKIHAI

SEQ ID NO: 10865 - protein, 9 aa, Homo sapiens
RVMEYINRL

SEQ ID NO: 10866 - protein, 9 aa, Homo sapiens
DLILELLDL

SEQ ID NO: 10867 - protein, 9 aa, Homo sapiens
ELAGIGILT

SEQ ID NO: 10868 - protein, 9 aa, Homo sapiens
FLLFIFKVA

SEQ ID NO: 10869 - protein, 9 aa, Homo sapiens
KLQQKEEQL

SEQ ID NO: 10870 - protein, 9 aa, Homo sapiens
KTVDLILEL

SEQ ID NO: 10871 - protein, 9 aa, Homo sapiens
LLQEEEEEL

SEQ ID NO: 10872 - protein, 9 aa, Homo sapiens
NLLEREFGA

SEQ ID NO: 10873 - protein, 9 aa, Homo sapiens
VLRKEEEKL

SEQ ID NO: 10874 - protein, 9 aa, Homo sapiens
AILASLTVI

SEQ ID NO: 10875 - protein, 9 aa, Homo sapiens
ALADIAVGV

SEQ ID NO: 10876 - protein, 8 aa, Homo sapiens
ALGTAAAL

SEQ ID NO: 10877 - protein, 10 aa, Homo sapiens
  misc_feature (9)..(9): Xaa can be any naturally occurring amino acid
ALPFVLLMXM

SEQ ID NO: 10878 - protein, 9 aa, Homo sapiens
ALVALTLVA

SEQ ID NO: 10879 - protein, 10 aa, Homo sapiens
ALVFAGGIGQ

SEQ ID NO: 10880 - protein, 10 aa, Homo sapiens
ATSSPPNDIS

SEQ ID NO: 10881 - protein, 10 aa, Homo sapiens
CEWVLVAPAG

SEQ ID NO: 10882 - protein, 13 aa, Homo sapiens
  misc_feature (12)..(12): Xaa can be any naturally occurring amino acid
DIAIDDLSFMDXM

SEQ ID NO: 10883 - protein, 9 aa, Homo sapiens
DLAQIIEAC

SEQ ID NO: 10884 - protein, 8 aa, Homo sapiens
DRAFLIEP

SEQ ID NO: 10885 - protein, 9 aa, Homo sapiens
ELCPLAEEL

SEQ ID NO: 10886 - protein, 9 aa, Homo sapiens
ETLLTAIAV

SEQ ID NO: 10887 - protein, 8 aa, Homo sapiens
EVWAAIPM

SEQ ID NO: 10888 - protein, 12 aa, Homo sapiens
FILLGFFGRWEL

SEQ ID NO: 10889 - protein, 8 aa, Homo sapiens
FLLERRLT

SEQ ID NO: 10890 - protein, 9 aa, Homo sapiens
FLLGNLSFL

SEQ ID NO: 10891 - protein, 9 aa, Homo sapiens
FPLPLLKRV

SEQ ID NO: 10892 - protein, 9 aa, Homo sapiens
GLLVLYILL

SEQ ID NO: 10893 - protein, 9 aa, Homo sapiens
GVSAWLNHL

SEQ ID NO: 10894 - protein, 11 aa, Homo sapiens
HLVDEAHCLRL

SEQ ID NO: 10895 - protein, 9 aa, Homo sapiens
HVPEHAVVL

SEQ ID NO: 10896 - protein, 9 aa, Homo sapiens
IKQKLILLQ

SEQ ID NO: 10897 - protein, 9 aa, Homo sapiens
ILEERSLLV

SEQ ID NO: 10898 - protein, 9 aa, Homo sapiens
ILLDVKTRL

SEQ ID NO: 10899 - protein, 10 aa, Homo sapiens
ISLEVDTGRT

SEQ ID NO: 10900 - protein, 8 aa, Homo sapiens
ITGVVITL

SEQ ID NO: 10901 - protein, 9 aa, Homo sapiens
ITLIIMGIV

SEQ ID NO: 10902 - protein, 10 aa, Homo sapiens
IVSRITQYIA

SEQ ID NO: 10903 - protein, 8 aa, Homo sapiens
KIEDGKAV

SEQ ID NO: 10904 - protein, 12 aa, Homo sapiens
  misc_feature (10)..(10): Xaa can be any naturally occurring amino acid
KIMHEIMYKXMM

SEQ ID NO: 10905 - protein, 11 aa, Homo sapiens
  misc_feature (10)..(10): Xaa can be any naturally occurring amino acid
KIYRSMAYEXM

SEQ ID NO: 10906 - protein, 9 aa, Homo sapiens
KLDLTLEIQ

SEQ ID NO: 10907 - protein, 10 aa, Homo sapiens
KLERVEGAAV

SEQ ID NO: 10908 - protein, 11 aa, Homo sapiens
KLLASDAEALS

SEQ ID NO: 10909 - protein, 9 aa, Homo sapiens
KLLSVLAQV

SEQ ID NO: 10910 - protein, 8 aa, Homo sapiens
KLQLLAVV

SEQ ID NO: 10911 - protein, 12 aa, Homo sapiens
  misc_feature (10)..(10): Xaa can be any naturally occurring amino acid
KMRLLNILMXMM

SEQ ID NO: 10912 - protein, 9 aa, Homo sapiens
KQDLITCLE

SEQ ID NO: 10913 - protein, 10 aa, Homo sapiens
KRVLLYVRKE

SEQ ID NO: 10914 - protein, 10 aa, Homo sapiens
KYLIGELVSS

SEQ ID NO: 10915 - protein, 9 aa, Homo sapiens
LADPENRQL

SEQ ID NO: 10916 - protein, 9 aa, Homo sapiens
LISDPVLLV

SEQ ID NO: 10917 - protein, 10 aa, Homo sapiens
LKFNKIVHSS

SEQ ID NO: 10918 - protein, 10 aa, Homo sapiens
LLDKVADNLA

SEQ ID NO: 10919 - protein, 11 aa, Homo sapiens
  misc_feature (10)..(10): Xaa can be any naturally occurring amino acid
LLMDTFFQIXM

SEQ ID NO: 10920 - protein, 9 aa, Homo sapiens
LLPPPTLGP

SEQ ID NO: 10921 - protein, 9 aa, Homo sapiens
LLSAKLPEL

SEQ ID NO: 10922 - protein, 8 aa, Homo sapiens
LLTDLKEQ

SEQ ID NO: 10923 - protein, 11 aa, Homo sapiens
  misc_feature (10)..(10): Xaa can be any naturally occurring amino acid
LMRGEPFASXM

SEQ ID NO: 10924 - protein, 8 aa, Homo sapiens
LSLNSLLP

SEQ ID NO: 10925 - protein, 9 aa, Homo sapiens
MIIVGLSVV

SEQ ID NO: 10926 - protein, 11 aa, Homo sapiens
  misc_feature (10)..(10): Xaa can be any naturally occurring amino acid
MITGTLILIXM

SEQ ID NO: 10927 - protein, 12 aa, Homo sapiens
MLMPKKNRIAIY

SEQ ID NO: 10928 - protein, 10 aa, Homo sapiens
MRYVASYLLA

SEQ ID NO: 10929 - protein, 11 aa, Homo sapiens
  misc_feature (10)..(10): Xaa can be any naturally occurring amino acid
MSGEKLVAIXM

SEQ ID NO: 10930 - protein, 9 aa, Homo sapiens
MVIQIQPPN

SEQ ID NO: 10931 - protein, 10 aa, Homo sapiens
NIDALKVINK

SEQ ID NO: 10932 - protein, 10 aa, Homo sapiens
  misc_feature (9)..(9): Xaa can be any naturally occurring amino acid
NIMSVVGVXM

SEQ ID NO: 10933 - protein, 9 aa, Homo sapiens
NLSEETNIV

SEQ ID NO: 10934 - protein, 10 aa, Homo sapiens
NTAEGTAFRL

SEQ ID NO: 10935 - protein, 8 aa, Homo sapiens
NTGIATTI

SEQ ID NO: 10936 - protein, 8 aa, Homo sapiens
PLEVNLAI

SEQ ID NO: 10937 - protein, 9 aa, Homo sapiens
PLVSVVDTI

SEQ ID NO: 10938 - protein, 11 aa, Homo sapiens
PNKLVELNKLF

SEQ ID NO: 10939 - protein, 9 aa, Homo sapiens
PVLDIKPYI

SEQ ID NO: 10940 - protein, 8 aa, Homo sapiens
PWNLVALS

SEQ ID NO: 10941 - protein, 9 aa, Homo sapiens
QGIAILAVV

SEQ ID NO: 10942 - protein, 9 aa, Homo sapiens
QIELLKELL

SEQ ID NO: 10943 - protein, 8 aa, Homo sapiens
QIGIVAVV

SEQ ID NO: 10944 - protein, 8 aa, Homo sapiens
QKWVELTD

SEQ ID NO: 10945 - protein, 10 aa, Homo sapiens
QLLSALQSLV

SEQ ID NO: 10946 - protein, 8 aa, Homo sapiens
QLPSDVGL

SEQ ID NO: 10947 - protein, 9 aa, Homo sapiens
QMKLDDICL

SEQ ID NO: 10948 - protein, 10 aa, Homo sapiens
QNMPETLPNN

SEQ ID NO: 10949 - protein, 9 aa, Homo sapiens
QQVQAPVEL

SEQ ID NO: 10950 - protein, 12 aa, Homo sapiens
  misc_feature (11)..(11): Xaa can be any naturally occurring amino acid
QSATVFMSEVXM

SEQ ID NO: 10951 - protein, 8 aa, Homo sapiens
QVDPEFLG

SEQ ID NO: 10952 - protein, 10 aa, Homo sapiens
RGVDLDQLLD

SEQ ID NO: 10953 - protein, 9 aa, Homo sapiens
RLSQELPEV

SEQ ID NO: 10954 - protein, 11 aa, Homo sapiens
RRKKKITDVLA

SEQ ID NO: 10955 - protein, 11 aa, Homo sapiens
SFLPEKSGYPD

SEQ ID NO: 10956 - protein, 9 aa, Homo sapiens
SIAEGRISL

SEQ ID NO: 10957 - protein, 8 aa, Homo sapiens
SISWDDRV

SEQ ID NO: 10958 - protein, 9 aa, Homo sapiens
SLCPDLMEI

SEQ ID NO: 10959 - protein, 10 aa, Homo sapiens
SLNTWLILCS

SEQ ID NO: 10960 - protein, 9 aa, Homo sapiens
TGPVATEVV

SEQ ID NO: 10961 - protein, 9 aa, Homo sapiens
TLLAGITGV

SEQ ID NO: 10962 - protein, 12 aa, Homo sapiens
  misc_feature (11)..(11): Xaa can be any naturally occurring amino acid
TTGVSVIMNTXM

SEQ ID NO: 10963 - protein, 8 aa, Homo sapiens
VEKLLVLD

SEQ ID NO: 10964 - protein, 9 aa, Homo sapiens
VISQGKIVL

SEQ ID NO: 10965 - protein, 10 aa, Homo sapiens
VLLSGTIRFN

SEQ ID NO: 10966 - protein, 9 aa, Homo sapiens
VPGAVLVFL

SEQ ID NO: 10967 - protein, 9 aa, Homo sapiens
YAIEVDPVL

SEQ ID NO: 10968 - protein, 11 aa, Homo sapiens
YILTTGLIPVL

SEQ ID NO: 10969 - protein, 11 aa, Homo sapiens
  misc_feature (10)..(10): Xaa can be any naturally occurring amino acid
YIMGYISKVXM

SEQ ID NO: 10970 - protein, 9 aa, Homo sapiens
YYDGKMVQL

SEQ ID NO: 10971 - protein, 10 aa, Homo sapiens
AQWGPDPAAA

SEQ ID NO: 10972 - protein, 10 aa, Bacteroides fragilis
MVWGPDPLYV

SEQ ID NO: 10973 - protein, 10 aa, Homo sapiens
RQFGPDFPTI

SEQ ID NO: 10974 - protein, 10 aa, [Clostridium] asparagiforme
RQFGPDWIVA

SEQ ID NO: 10975 - protein, 10 aa, Homo sapiens
YLGGPDFPTI

SEQ ID NO: 10976 - protein, 10 aa, Homo sapiens
YQFGPDFPIA

SEQ ID NO: 10977 - protein, 9 aa, Human adenovirus 31
ILHTNMPNV

SEQ ID NO: 10978 - protein, 9 aa, Hepatitis C virus
CINGVFWTV

SEQ ID NO: 10979 - protein, 9 aa, Hepatitis C virus
CLNGVCWTV

SEQ ID NO: 10980 - protein, 10 aa, Hepatitis C virus
KLLALGINAV

SEQ ID NO: 10981 - protein, 10 aa, Hepatitis C virus
KLSSLGLNSV

SEQ ID NO: 10982 - protein, 10 aa, Hepatitis C virus
KLTALGINAV

SEQ ID NO: 10983 - protein, 10 aa, Hepatitis C virus
KLVALGNNAV

SEQ ID NO: 10984 - protein, 10 aa, Hepatitis C virus
KLVTLGINAV

SEQ ID NO: 10985 - protein, 9 aa, Homo sapiens
ALDILITNV

SEQ ID NO: 10986 - protein, 11 aa, Homo sapiens
ALDRQTATQLL

SEQ ID NO: 10987 - protein, 12 aa, Homo sapiens
ALIDGSREGFYL

SEQ ID NO: 10988 - protein, 9 aa, Homo sapiens
ALLAELEKI

SEQ ID NO: 10989 - protein, 10 aa, Homo sapiens
ALLERASATL

SEQ ID NO: 10990 - protein, 9 aa, Homo sapiens
ALQDSNNKL

SEQ ID NO: 10991 - protein, 9 aa, Homo sapiens
ALSELTQGV

SEQ ID NO: 10992 - protein, 9 aa, Homo sapiens
ALTDIDLQL

SEQ ID NO: 10993 - protein, 9 aa, Homo sapiens
ALTDKAIVK

SEQ ID NO: 10994 - protein, 12 aa, Homo sapiens
AMLGTHTMEVTV

SEQ ID NO: 10995 - protein, 9 aa, Homo sapiens
AQYGKVIDR

SEQ ID NO: 10996 - protein, 9 aa, Homo sapiens
ELSDVLIYL

SEQ ID NO: 10997 - protein, 11 aa, Homo sapiens
FLPPEHTIVYI

SEQ ID NO: 10998 - protein, 10 aa, Homo sapiens
GTMDMSITRL

SEQ ID NO: 10999 - protein, 12 aa, Homo sapiens
GVYDIDNKTIEL

SEQ ID NO: 11000 - protein, 9 aa, Homo sapiens
HVDSTLLQV

SEQ ID NO: 11001 - protein, 10 aa, Homo sapiens
HVFDHPWETV

SEQ ID NO: 11002 - protein, 9 aa, Homo sapiens
HVITKTMEL

SEQ ID NO: 11003 - protein, 9 aa, Homo sapiens
KIFEDIPTL

SEQ ID NO: 11004 - protein, 12 aa, Homo sapiens
KIWDLKERTNVA

SEQ ID NO: 11005 - protein, 12 aa, Homo sapiens
KLLNVDPDNVVL

SEQ ID NO: 11006 - protein, 9 aa, Homo sapiens
KLQEENHQL

SEQ ID NO: 11007 - protein, 11 aa, Homo sapiens
KMDDPTVNWSI

SEQ ID NO: 11008 - protein, 9 aa, Homo sapiens
KMQEDLVTL

SEQ ID NO: 11009 - protein, 11 aa, Homo sapiens
KMYGYVDTLLT

SEQ ID NO: 11010 - protein, 9 aa, Homo sapiens
KQDFSVPQL

SEQ ID NO: 11011 - protein, 8 aa, Homo sapiens
KQDILYLH

SEQ ID NO: 11012 - protein, 10 aa, Homo sapiens
KTMEDTLMTV

SEQ ID NO: 11013 - protein, 12 aa, Homo sapiens
KTWDQVPFSVSV

SEQ ID NO: 11014 - protein, 9 aa, Homo sapiens
KTWNAVLLR

SEQ ID NO: 11015 - protein, 10 aa, Homo sapiens
KVLGKGSFGK

SEQ ID NO: 11016 - protein, 10 aa, Homo sapiens
LLFERELHSV

SEQ ID NO: 11017 - protein, 9 aa, Homo sapiens
MIRKEELEI

SEQ ID NO: 11018 - protein, 11 aa, Homo sapiens
NLFEWAKNSPL

SEQ ID NO: 11019 - protein, 11 aa, Homo sapiens
NLMNNPQIQQL

SEQ ID NO: 11020 - protein, 11 aa, Homo sapiens
NLWDLTDASVV

SEQ ID NO: 11021 - protein, 9 aa, Homo sapiens
NMAEGFRTV

SEQ ID NO: 11022 - protein, 9 aa, Homo sapiens
QLWEKAQRL

SEQ ID NO: 11023 - protein, 9 aa, Homo sapiens
QQQQQQQQF

SEQ ID NO: 11024 - protein, 9 aa, Homo sapiens
RIDITLSSV

SEQ ID NO: 11025 - protein, 9 aa, Homo sapiens
RIDLIPSLY

SEQ ID NO: 11026 - protein, 9 aa, Homo sapiens
RILDESHSI

SEQ ID NO: 11027 - protein, 9 aa, Homo sapiens
RLDQLLRHV

SEQ ID NO: 11028 - protein, 9 aa, Homo sapiens
RLDQVIRQR

SEQ ID NO: 11029 - protein, 11 aa, Homo sapiens
RLFNDPVAMVL

SEQ ID NO: 11030 - protein, 9 aa, Homo sapiens
RLLDKWVEL

SEQ ID NO: 11031 - protein, 9 aa, Homo sapiens
RLLELETRL

SEQ ID NO: 11032 - protein, 9 aa, Homo sapiens
RLLKSKLYL

SEQ ID NO: 11033 - protein, 9 aa, Homo sapiens
RLNDFASTV

SEQ ID NO: 11034 - protein, 10 aa, Homo sapiens
RLPDIPLRQV

SEQ ID NO: 11035 - protein, 10 aa, Homo sapiens
RLYDEKQQHI

SEQ ID NO: 11036 - protein, 8 aa, Homo sapiens
RLYQAIQR

SEQ ID NO: 11037 - protein, 11 aa, Homo sapiens
RQLGSKYILGI

SEQ ID NO: 11038 - protein, 9 aa, Homo sapiens
RQVTGVTRV

SEQ ID NO: 11039 - protein, 11 aa, Homo sapiens
RVMEEIRNLTV

SEQ ID NO: 11040 - protein, 11 aa, Homo sapiens
SLAERVDRLQV

SEQ ID NO: 11041 - protein, 9 aa, Homo sapiens
SLDGFTIQV

SEQ ID NO: 11042 - protein, 9 aa, Homo sapiens
SLINNPAFI

SEQ ID NO: 11043 - protein, 9 aa, Homo sapiens
SLLEERFRV

SEQ ID NO: 11044 - protein, 10 aa, Homo sapiens
SVAVLRGIQK

SEQ ID NO: 11045 - protein, 12 aa, Homo sapiens
SVMEVNSGIYRV

SEQ ID NO: 11046 - protein, 9 aa, Homo sapiens
THFPDETEI

SEQ ID NO: 11047 - protein, 9 aa, Homo sapiens
TVLEQVLPI

SEQ ID NO: 11048 - protein, 11 aa, Homo sapiens
VLWSDSSITSV

SEQ ID NO: 11049 - protein, 8 aa, Homo sapiens
VMAPRTLL

SEQ ID NO: 11050 - protein, 9 aa, Homo sapiens
VMLDKQKEL

SEQ ID NO: 11051 - protein, 9 aa, Homo sapiens
WLLDNVRKV

SEQ ID NO: 11052 - protein, 11 aa, Homo sapiens
YIMEPSIFNTL

SEQ ID NO: 11053 - protein, 11 aa, Homo sapiens
YLINEIDRIRA

SEQ ID NO: 11054 - protein, 11 aa, Homo sapiens
YLINNPNQISL

SEQ ID NO: 11055 - protein, 9 aa, Homo sapiens
IMPGQEAGL

SEQ ID NO: 11056 - protein, 9 aa, Homo sapiens
QILKGGSGT

SEQ ID NO: 11057 - protein, 9 aa, Homo sapiens
QLIMPGQEA

SEQ ID NO: 11058 - protein, 9 aa, Homo sapiens
SLAVVSTQL

SEQ ID NO: 11059 - protein, 9 aa, Homo sapiens
SSADVEFCL

SEQ ID NO: 11060 - protein, 9 aa, Homo sapiens
VIMPCSWWV

SEQ ID NO: 11061 - protein, 8 aa, Homo sapiens
AIRNDEEL

SEQ ID NO: 11062 - protein, 9 aa, Homo sapiens
FLLEREQLL

SEQ ID NO: 11063 - protein, 9 aa, Homo sapiens
IIADNIIFL

SEQ ID NO: 11064 - protein, 9 aa, Homo sapiens
RIFAPNHVV

SEQ ID NO: 11065 - protein, 9 aa, Homo sapiens
RIHPVSTMV

SEQ ID NO: 11066 - protein, 9 aa, Homo sapiens
RILDILEYI

SEQ ID NO: 11067 - protein, 9 aa, Homo sapiens
RISPWLLRV

SEQ ID NO: 11068 - protein, 9 aa, Homo sapiens
YLNDLHEVL

SEQ ID NO: 11069 - protein, 9 aa, Homo sapiens
YVHMVTHFI

SEQ ID NO: 11070 - protein, 9 aa, Homo sapiens
ILAKFLHEL

SEQ ID NO: 11071 - protein, 9 aa, Homo sapiens
ILAKFLHRL

SEQ ID NO: 11072 - protein, 9 aa, Homo sapiens
ILAKFLHTL

SEQ ID NO: 11073 - protein, 9 aa, Homo sapiens
ILGKFLHRL

SEQ ID NO: 11074 - protein, 9 aa, Homo sapiens
ILGKFLHTL

SEQ ID NO: 11075 - protein, 9 aa, Homo sapiens
ILGKFLHWL

SEQ ID NO: 11076 - protein, 9 aa, Homo sapiens
AAFAHFPEL

SEQ ID NO: 11077 - protein, 9 aa, Homo sapiens
AALKLPLLV

SEQ ID NO: 11078 - protein, 9 aa, Homo sapiens
AALSKIFAV

SEQ ID NO: 11079 - protein, 9 aa, Homo sapiens
AAMSVAQRV

SEQ ID NO: 11080 - protein, 11 aa, Homo sapiens
AIAPCEVTVPA

SEQ ID NO: 11081 - protein, 9 aa, Homo sapiens
AIFAIPLQI

SEQ ID NO: 11082 - protein, 9 aa, Homo sapiens
AIYPEPFLI

SEQ ID NO: 11083 - protein, 9 aa, Homo sapiens
ALASLVQHI

SEQ ID NO: 11084 - protein, 9 aa, Homo sapiens
ALDCSEVTV

SEQ ID NO: 11085 - protein, 9 aa, Homo sapiens
ALDEICFKV

SEQ ID NO: 11086 - protein, 9 aa, Homo sapiens
ALDEQLVQV

SEQ ID NO: 11087 - protein, 9 aa, Homo sapiens
ALDVSPKHV

SEQ ID NO: 11088 - protein, 9 aa, Homo sapiens
ALGAVSQRI

SEQ ID NO: 11089 - protein, 8 aa, Homo sapiens
ALGLLYHV

SEQ ID NO: 11090 - protein, 10 aa, Homo sapiens
ALIDEQILCV

SEQ ID NO: 11091 - protein, 9 aa, Homo sapiens
ALIGQCIHI

SEQ ID NO: 11092 - protein, 9 aa, Homo sapiens
ALKEGDVTI

SEQ ID NO: 11093 - protein, 9 aa, Homo sapiens
ALLDCANKV

SEQ ID NO: 11094 - protein, 10 aa, Homo sapiens
ALLEDSCHYL

SEQ ID NO: 11095 - protein, 11 aa, Homo sapiens
ALLGAGCDPEL

SEQ ID NO: 11096 - protein, 9 aa, Homo sapiens
ALLKKLQHA

SEQ ID NO: 11097 - protein, 9 aa, Homo sapiens
ALLNGEYLL

SEQ ID NO: 11098 - protein, 10 aa, Homo sapiens
ALMAGCIQEA

SEQ ID NO: 11099 - protein, 9 aa, Homo sapiens
ALNDCIYSV

SEQ ID NO: 11100 - protein, 10 aa, Homo sapiens
ALNPAALTAL

SEQ ID NO: 11101 - protein, 9 aa, Homo sapiens
ALNRLFQQI

SEQ ID NO: 11102 - protein, 9 aa, Homo sapiens
ALPQIAAKI

SEQ ID NO: 11103 - protein, 10 aa, Homo sapiens
ALQDVPLSSV

SEQ ID NO: 11104 - protein, 9 aa, Homo sapiens
ALRPPLPPL

SEQ ID NO: 11105 - protein, 9 aa, Homo sapiens
ALSLVSCKL

SEQ ID NO: 11106 - protein, 10 aa, Homo sapiens
ALSPITKLSV

SEQ ID NO: 11107 - protein, 9 aa, Homo sapiens
ALSQLVPCV

SEQ ID NO: 11108 - protein, 9 aa, Homo sapiens
ALTSIAQKI

SEQ ID NO: 11109 - protein, 10 aa, Homo sapiens
ALVDGPCTQV

SEQ ID NO: 11110 - protein, 9 aa, Homo sapiens
ALYGHTQAV

SEQ ID NO: 11111 - protein, 9 aa, Homo sapiens
ALYTLVNKV

SEQ ID NO: 11112 - protein, 9 aa, Homo sapiens
AMLKEVCTA

SEQ ID NO: 11113 - protein, 9 aa, Homo sapiens
AMQEYIAVV

SEQ ID NO: 11114 - protein, 9 aa, Homo sapiens
AQFKGTQSL

SEQ ID NO: 11115 - protein, 9 aa, Homo sapiens
AQHPNIVTV

SEQ ID NO: 11116 - protein, 9 aa, Homo sapiens
AQIDHYLGL

SEQ ID NO: 11117 - protein, 9 aa, Homo sapiens
AQITQKIGV

SEQ ID NO: 11118 - protein, 8 aa, Homo sapiens
AQLKQWLV

SEQ ID NO: 11119 - protein, 9 aa, Homo sapiens
AQLPMSIRI

SEQ ID NO: 11120 - protein, 9 aa, Homo sapiens
AQNDLIWNI

SEQ ID NO: 11121 - protein, 9 aa, Homo sapiens
AQSGFPLRV

SEQ ID NO: 11122 - protein, 9 aa, Homo sapiens
AQVPVFLAL

SEQ ID NO: 11123 - protein, 9 aa, Homo sapiens
AQYFEPLTL

SEQ ID NO: 11124 - protein, 10 aa, Homo sapiens
ATLGAILNRL

SEQ ID NO: 11125 - protein, 9 aa, Homo sapiens
AVHNVPLSV

SEQ ID NO: 11126 - protein, 9 aa, Homo sapiens
AVIHEAPAV

SEQ ID NO: 11127 - protein, 11 aa, Homo sapiens
AVLDGADCIML

SEQ ID NO: 11128 - protein, 9 aa, Homo sapiens
AVMACRNEV

SEQ ID NO: 11129 - protein, 9 aa, Homo sapiens
AVSAAVQAV

SEQ ID NO: 11130 - protein, 9 aa, Homo sapiens
FAQEALTVL

SEQ ID NO: 11131 - protein, 9 aa, Homo sapiens
FATKVVHLL

SEQ ID NO: 11132 - protein, 9 aa, Homo sapiens
FAVPKNYKL

SEQ ID NO: 11133 - protein, 9 aa, Homo sapiens
FIDEAGHCM

SEQ ID NO: 11134 - protein, 9 aa, Homo sapiens
FIISRTQAL

SEQ ID NO: 11135 - protein, 9 aa, Homo sapiens
FIMDNCEEL

SEQ ID NO: 11136 - protein, 9 aa, Homo sapiens
FIMDSCDEL

SEQ ID NO: 11137 - protein, 9 aa, Homo sapiens
FIPATGHSL

SEQ ID NO: 11138 - protein, 9 aa, Homo sapiens
FISGHTSEL

SEQ ID NO: 11139 - protein, 9 aa, Homo sapiens
FITNIPFDV

SEQ ID NO: 11140 - protein, 9 aa, Homo sapiens
FLDNACHQL

SEQ ID NO: 11141 - protein, 10 aa, Homo sapiens
FLDPYCSASV

SEQ ID NO: 11142 - protein, 9 aa, Homo sapiens
FLDSLIYGA

SEQ ID NO: 11143 - protein, 9 aa, Homo sapiens
FLEEANRVL

SEQ ID NO: 11144 - protein, 11 aa, Homo sapiens
FLFDCPGQVEL

SEQ ID NO: 11145 - protein, 9 aa, Homo sapiens
FLFPNKESL

SEQ ID NO: 11146 - protein, 9 aa, Homo sapiens
FLFTTPCRL

SEQ ID NO: 11147 - protein, 8 aa, Homo sapiens
FLGRVLEA

SEQ ID NO: 11148 - protein, 9 aa, Homo sapiens
FLGSILTAV

SEQ ID NO: 11149 - protein, 9 aa, Homo sapiens
FLIDNGVSL

SEQ ID NO: 11150 - protein, 9 aa, Homo sapiens
FLIEEQKIV

SEQ ID NO: 11151 - protein, 9 aa, Homo sapiens
FLKKQIPAI

SEQ ID NO: 11152 - protein, 10 aa, Homo sapiens
FLKQGEDHCL

SEQ ID NO: 11153 - protein, 9 aa, Homo sapiens
FLLKSCPLL

SEQ ID NO: 11154 - protein, 9 aa, Homo sapiens
FLLPTLRKV

SEQ ID NO: 11155 - protein, 9 aa, Homo sapiens
FLMGPIECL

SEQ ID NO: 11156 - protein, 9 aa, Homo sapiens
FLNHCLEHL

SEQ ID NO: 11157 - protein, 9 aa, Homo sapiens
FLPGISTAL

SEQ ID NO: 11158 - protein, 10 aa, Homo sapiens
FLPTRALAAL

SEQ ID NO: 11159 - protein, 9 aa, Homo sapiens
FLQPNRQFL

SEQ ID NO: 11160 - protein, 9 aa, Homo sapiens
FLSPDKLSL

SEQ ID NO: 11161 - protein, 9 aa, Homo sapiens
FLYIRQLAI

SEQ ID NO: 11162 - protein, 9 aa, Homo sapiens
FLYTFCHHL

SEQ ID NO: 11163 - protein, 9 aa, Homo sapiens
FMADCPHTI

SEQ ID NO: 11164 - protein, 9 aa, Homo sapiens
FMNSSIQCV

SEQ ID NO: 11165 - protein, 9 aa, Homo sapiens
FQMEQIVYC

SEQ ID NO: 11166 - protein, 9 aa, Homo sapiens
FQNNAIHYI

SEQ ID NO: 11167 - protein, 9 aa, Homo sapiens
FQTSHTLHL

SEQ ID NO: 11168 - protein, 9 aa, Homo sapiens
FTDPCNYQL

SEQ ID NO: 11169 - protein, 8 aa, Homo sapiens
FTGAPLKV

SEQ ID NO: 11170 - protein, 9 aa, Homo sapiens
FTLSHITQL

SEQ ID NO: 11171 - protein, 10 aa, Homo sapiens
FVADEGICYL

SEQ ID NO: 11172 - protein, 9 aa, Homo sapiens
FVDEGIKTL

SEQ ID NO: 11173 - protein, 9 aa, Homo sapiens
FVLPCIQQI

SEQ ID NO: 11174 - protein, 9 aa, Homo sapiens
FVSPLVKYL

SEQ ID NO: 11175 - protein, 9 aa, Homo sapiens
FVTSSHLQL

SEQ ID NO: 11176 - protein, 9 aa, Homo sapiens
GLADCLLYL

SEQ ID NO: 11177 - protein, 9 aa, Homo sapiens
GLAFVPLQI

SEQ ID NO: 11178 - protein, 9 aa, Homo sapiens
GLAPPQHLI

SEQ ID NO: 11179 - protein, 10 aa, Homo sapiens
GLARCSLVNV

SEQ ID NO: 11180 - protein, 9 aa, Homo sapiens
GLDEAIRKV

SEQ ID NO: 11181 - protein, 9 aa, Homo sapiens
GLDIPHCNV

SEQ ID NO: 11182 - protein, 11 aa, Homo sapiens
GLDPSTPAQVI

SEQ ID NO: 11183 - protein, 9 aa, Homo sapiens
GLGPWVPLA

SEQ ID NO: 11184 - protein, 10 aa, Homo sapiens
GLIIRKPVTV

SEQ ID NO: 11185 - protein, 9 aa, Homo sapiens
GLLDCPIFL

SEQ ID NO: 11186 - protein, 10 aa, Homo sapiens
GLLDLPDASV

SEQ ID NO: 11187 - protein, 9 aa, Homo sapiens
GLLEFLRPA

SEQ ID NO: 11188 - protein, 9 aa, Homo sapiens
GLLENSPHL

SEQ ID NO: 11189 - protein, 9 aa, Homo sapiens
GLNSIVHKA

SEQ ID NO: 11190 - protein, 9 aa, Homo sapiens
GLNTIPLFV

SEQ ID NO: 11191 - protein, 9 aa, Homo sapiens
GLYPAPLKI

SEQ ID NO: 11192 - protein, 10 aa, Homo sapiens
GLYSKTSQSV

SEQ ID NO: 11193 - protein, 9 aa, Homo sapiens
GQADPVVAV

SEQ ID NO: 11194 - protein, 9 aa, Homo sapiens
GQMGSFIRL

SEQ ID NO: 11195 - protein, 9 aa, Homo sapiens
GQSPHKFTV

SEQ ID NO: 11196 - protein, 9 aa, Homo sapiens
GQTSVVSFL

SEQ ID NO: 11197 - protein, 9 aa, Homo sapiens
GQWLWAQRL

SEQ ID NO: 11198 - protein, 9 aa, Homo sapiens
GTIGLIHAV

SEQ ID NO: 11199 - protein, 9 aa, Homo sapiens
GVAFFPLHI

SEQ ID NO: 11200 - protein, 9 aa, Homo sapiens
GVSDVELRV

SEQ ID NO: 11201 - protein, 9 aa, Homo sapiens
HAAGVLLHV

SEQ ID NO: 11202 - protein, 9 aa, Homo sapiens
HIDNNILLI

SEQ ID NO: 11203 - protein, 9 aa, Homo sapiens
HILECEFYL

SEQ ID NO: 11204 - protein, 9 aa, Homo sapiens
HLAEALEQL

SEQ ID NO: 11205 - protein, 10 aa, Homo sapiens
HLHNMPPSAL

SEQ ID NO: 11206 - protein, 9 aa, Homo sapiens
HLLKSETSV

SEQ ID NO: 11207 - protein, 9 aa, Homo sapiens
HLLPCEVAV

SEQ ID NO: 11208 - protein, 9 aa, Homo sapiens
HLLPTEQRI

SEQ ID NO: 11209 - protein, 10 aa, Homo sapiens
HLLSGQLPTI

SEQ ID NO: 11210 - protein, 9 aa, Homo sapiens
HLPPGFLHL

SEQ ID NO: 11211 - protein, 9 aa, Homo sapiens
HLSELVQQI

SEQ ID NO: 11212 - protein, 9 aa, Homo sapiens
HQLNICSKV

SEQ ID NO: 11213 - protein, 9 aa, Homo sapiens
HVSEVPVSV

SEQ ID NO: 11214 - protein, 9 aa, Homo sapiens
IIADCQVYL

SEQ ID NO: 11215 - protein, 9 aa, Homo sapiens
IIFHLGHAA

SEQ ID NO: 11216 - protein, 9 aa, Homo sapiens
IIQHSIPAV

SEQ ID NO: 11217 - protein, 9 aa, Homo sapiens
ILDDVCATM

SEQ ID NO: 11218 - protein, 9 aa, Homo sapiens
ILDKNLESV

SEQ ID NO: 11219 - protein, 9 aa, Homo sapiens
ILDPCIYRV

SEQ ID NO: 11220 - protein, 11 aa, Homo sapiens
ILFDCPGQIEL

SEQ ID NO: 11221 - protein, 9 aa, Homo sapiens
ILHDAVVFL

SEQ ID NO: 11222 - protein, 11 aa, Homo sapiens
ILIECGADVNV

SEQ ID NO: 11223 - protein, 9 aa, Homo sapiens
ILLEKEAEL

SEQ ID NO: 11224 - protein, 8 aa, Homo sapiens
ILNKALLL

SEQ ID NO: 11225 - protein, 10 aa, Homo sapiens
ILQEYVEHQV

SEQ ID NO: 11226 - protein, 9 aa, Homo sapiens
ILSDDCATL

SEQ ID NO: 11227 - protein, 9 aa, Homo sapiens
ILTAVLPCL

SEQ ID NO: 11228 - protein, 9 aa, Homo sapiens
ILTSDVPQI

SEQ ID NO: 11229 - protein, 9 aa, Homo sapiens
ILWEHCIRL

SEQ ID NO: 11230 - protein, 9 aa, Homo sapiens
ILYDSNCQL

SEQ ID NO: 11231 - protein, 9 aa, Homo sapiens
IQDFEMPTV

SEQ ID NO: 11232 - protein, 9 aa, Homo sapiens
IQDKCVPLV

SEQ ID NO: 11233 - protein, 9 aa, Homo sapiens
IQLPACLRV

SEQ ID NO: 11234 - protein, 9 aa, Homo sapiens
IQVNCPPAV

SEQ ID NO: 11235 - protein, 9 aa, Homo sapiens
IQWSIVPEV

SEQ ID NO: 11236 - protein, 8 aa, Homo sapiens
ITSKILFV

SEQ ID NO: 11237 - protein, 9 aa, Homo sapiens
IVMEQSCEL

SEQ ID NO: 11238 - protein, 9 aa, Homo sapiens
IVPEGVHAL

SEQ ID NO: 11239 - protein, 9 aa, Homo sapiens
IVSPVVAAV

SEQ ID NO: 11240 - protein, 9 aa, Homo sapiens
KIPEDVSGL

SEQ ID NO: 11241 - protein, 9 aa, Homo sapiens
KITSCIFQL

SEQ ID NO: 11242 - protein, 9 aa, Homo sapiens
KIYEGAYHV

SEQ ID NO: 11243 - protein, 9 aa, Homo sapiens
KLADICKNL

SEQ ID NO: 11244 - protein, 9 aa, Homo sapiens
KLDDCITYI

SEQ ID NO: 11245 - protein, 9 aa, Homo sapiens
KLDVQPKCV

SEQ ID NO: 11246 - protein, 9 aa, Homo sapiens
KLFVIAQKI

SEQ ID NO: 11247 - protein, 9 aa, Homo sapiens
KLIDIQEKI

SEQ ID NO: 11248 - protein, 10 aa, Homo sapiens
KLIEESCPQL

SEQ ID NO: 11249 - protein, 9 aa, Homo sapiens
KLIPNAIQI

SEQ ID NO: 11250 - protein, 9 aa, Homo sapiens
KLKEIFDKI

SEQ ID NO: 11251 - protein, 10 aa, Homo sapiens
KLLDAGDLDI

SEQ ID NO: 11252 - protein, 9 aa, Homo sapiens
KLLEEICNL

SEQ ID NO: 11253 - protein, 10 aa, Homo sapiens
KLLEGEECRI

SEQ ID NO: 11254 - protein, 10 aa, Homo sapiens
KLLEVVQPCL

SEQ ID NO: 11255 - protein, 9 aa, Homo sapiens
KLLKPSLAV

SEQ ID NO: 11256 - protein, 9 aa, Homo sapiens
KLLNIQQQL

SEQ ID NO: 11257 - protein, 10 aa, Homo sapiens
KLPEYNPRTL

SEQ ID NO: 11258 - protein, 9 aa, Homo sapiens
KLQNKEHVI

SEQ ID NO: 11259 - protein, 9 aa, Homo sapiens
KLRDLEDSL

SEQ ID NO: 11260 - protein, 9 aa, Homo sapiens
KLRECESVL

SEQ ID NO: 11261 - protein, 9 aa, Homo sapiens
KLRQLQDLV

SEQ ID NO: 11262 - protein, 9 aa, Homo sapiens
KLTELEQRI

SEQ ID NO: 11263 - protein, 9 aa, Homo sapiens
KLVDCIIEV

SEQ ID NO: 11264 - protein, 11 aa, Homo sapiens
KLWDPRTPCNA

SEQ ID NO: 11265 - protein, 9 aa, Homo sapiens
KQAFERLEV

SEQ ID NO: 11266 - protein, 9 aa, Homo sapiens
KQAGLVSKI

SEQ ID NO: 11267 - protein, 9 aa, Homo sapiens
KQFGNILIL

SEQ ID NO: 11268 - protein, 9 aa, Homo sapiens
KQGKVIIVV

SEQ ID NO: 11269 - protein, 9 aa, Homo sapiens
KQHFINQAV

SEQ ID NO: 11270 - protein, 9 aa, Homo sapiens
KQIDVYRSV

SEQ ID NO: 11271 - protein, 9 aa, Homo sapiens
KQINQEYLI

SEQ ID NO: 11272 - protein, 9 aa, Homo sapiens
KQIPAITCI

SEQ ID NO: 11273 - protein, 9 aa, Homo sapiens
KQIWQNLGL

SEQ ID NO: 11274 - protein, 10 aa, Homo sapiens
KQLASGLLLV

SEQ ID NO: 11275 - protein, 10 aa, Homo sapiens
KQLDGIHVTI

SEQ ID NO: 11276 - protein, 9 aa, Homo sapiens
KQLLHSCTV

SEQ ID NO: 11277 - protein, 9 aa, Homo sapiens
KQPAFTIHV

SEQ ID NO: 11278 - protein, 9 aa, Homo sapiens
KQTDFEHRI

SEQ ID NO: 11279 - protein, 9 aa, Homo sapiens
KQVKQFLLL

SEQ ID NO: 11280 - protein, 10 aa, Homo sapiens
KQYEGGIFKI

SEQ ID NO: 11281 - protein, 9 aa, Homo sapiens
KQYVTSLLL

SEQ ID NO: 11282 - protein, 9 aa, Homo sapiens
KTAEFLSKL

SEQ ID NO: 11283 - protein, 9 aa, Homo sapiens
KTGEHTWSL

SEQ ID NO: 11284 - protein, 9 aa, Homo sapiens
KTNHVFFLL

SEQ ID NO: 11285 - protein, 9 aa, Homo sapiens
KVADYIPQL

SEQ ID NO: 11286 - protein, 9 aa, Homo sapiens
KVVNIVPVI

SEQ ID NO: 11287 - protein, 9 aa, Homo sapiens
LAAGFQWYL

SEQ ID NO: 11288 - protein, 9 aa, Homo sapiens
LIDEQILCV

SEQ ID NO: 11289 - protein, 9 aa, Homo sapiens
LLADACWAL

SEQ ID NO: 11290 - protein, 9 aa, Homo sapiens
LLAQPGEAL

SEQ ID NO: 11291 - protein, 9 aa, Homo sapiens
LLDCDTPSV

SEQ ID NO: 11292 - protein, 9 aa, Homo sapiens
LLDGCRIYL

SEQ ID NO: 11293 - protein, 11 aa, Homo sapiens
LLDHTGGCMYI

SEQ ID NO: 11294 - protein, 9 aa, Homo sapiens
LLDKNCHLL

SEQ ID NO: 11295 - protein, 9 aa, Homo sapiens
LLDVTCKTV

SEQ ID NO: 11296 - protein, 9 aa, Homo sapiens
LLEDSCHYL

SEQ ID NO: 11297 - protein, 9 aa, Homo sapiens
LLEPCIPSV

SEQ ID NO: 11298 - protein, 9 aa, Homo sapiens
LLFEGEKKI

SEQ ID NO: 11299 - protein, 9 aa, Homo sapiens
LLHEVPHEV

SEQ ID NO: 11300 - protein, 9 aa, Homo sapiens
LLHGHIVEL

SEQ ID NO: 11301 - protein, 10 aa, Homo sapiens
LLHSLQLPEA

SEQ ID NO: 11302 - protein, 9 aa, Homo sapiens
LLKDCEAEV

SEQ ID NO: 11303 - protein, 9 aa, Homo sapiens
LLPDIVTCV

SEQ ID NO: 11304 - protein, 9 aa, Homo sapiens
LLPDLIQKV

SEQ ID NO: 11305 - protein, 9 aa, Homo sapiens
LLPTGLSSL

SEQ ID NO: 11306 - protein, 9 aa, Homo sapiens
LLQEHNNAL

SEQ ID NO: 11307 - protein, 9 aa, Homo sapiens
LLQGTLLKI

SEQ ID NO: 11308 - protein, 9 aa, Homo sapiens
LLRDYEPQL

SEQ ID NO: 11309 - protein, 9 aa, Homo sapiens
LLTVTSQLL

SEQ ID NO: 11310 - protein, 9 aa, Homo sapiens
LLVEEIHRL

SEQ ID NO: 11311 - protein, 9 aa, Homo sapiens
LLWQSLILL

SEQ ID NO: 11312 - protein, 9 aa, Homo sapiens
LLYDNVPGA

SEQ ID NO: 11313 - protein, 9 aa, Homo sapiens
LMAGCIQEA

SEQ ID NO: 11314 - protein, 9 aa, Homo sapiens
LMKDCEAEV

SEQ ID NO: 11315 - protein, 9 aa, Homo sapiens
LMNNHQLEL

SEQ ID NO: 11316 - protein, 9 aa, Homo sapiens
LQLEAIHKV

SEQ ID NO: 11317 - protein, 9 aa, Homo sapiens
LQPEHPREV

SEQ ID NO: 11318 - protein, 9 aa, Homo sapiens
MAPERVASL

SEQ ID NO: 11319 - protein, 9 aa, Homo sapiens
NILSEVTAV

SEQ ID NO: 11320 - protein, 9 aa, Homo sapiens
NLQEGEFLL

SEQ ID NO: 11321 - protein, 9 aa, Homo sapiens
NLTDICTQL

SEQ ID NO: 11322 - protein, 10 aa, Homo sapiens
PLCIGRLIPV

SEQ ID NO: 11323 - protein, 9 aa, Homo sapiens
QILEAIPQV

SEQ ID NO: 11324 - protein, 9 aa, Homo sapiens
QILEGVYYL

SEQ ID NO: 11325 - protein, 9 aa, Homo sapiens
QIMEDLRTL

SEQ ID NO: 11326 - protein, 9 aa, Homo sapiens
QLAPVFQRV

SEQ ID NO: 11327 - protein, 9 aa, Homo sapiens
QLFDQIPEL

SEQ ID NO: 11328 - protein, 9 aa, Homo sapiens
QLHGLQLRI

SEQ ID NO: 11329 - protein, 10 aa, Homo sapiens
QLLDCDTPSV

SEQ ID NO: 11330 - protein, 9 aa, Homo sapiens
QLLEDSHQV

SEQ ID NO: 11331 - protein, 9 aa, Homo sapiens
QLPEGASAV

SEQ ID NO: 11332 - protein, 9 aa, Homo sapiens
QLPELFHKI

SEQ ID NO: 11333 - protein, 9 aa, Homo sapiens
QLPSGWASI

SEQ ID NO: 11334 - protein, 11 aa, Homo sapiens
QLQPTDALLCV

SEQ ID NO: 11335 - protein, 9 aa, Homo sapiens
QLSDVAEKL

SEQ ID NO: 11336 - protein, 10 aa, Homo sapiens
QQSCGTYLRV

SEQ ID NO: 11337 - protein, 9 aa, Homo sapiens
RAFGIPIRV

SEQ ID NO: 11338 - protein, 9 aa, Homo sapiens
RALDHYLTL

SEQ ID NO: 11339 - protein, 9 aa, Homo sapiens
RIDGKTYVI

SEQ ID NO: 11340 - protein, 9 aa, Homo sapiens
RIFEKMFAM

SEQ ID NO: 11341 - protein, 8 aa, Homo sapiens
RIFKAWAV

SEQ ID NO: 11342 - protein, 9 aa, Homo sapiens
RIIDCAFTV

SEQ ID NO: 11343 - protein, 9 aa, Homo sapiens
RIIEAAHQV

SEQ ID NO: 11344 - protein, 10 aa, Homo sapiens
RILGGVISAI

SEQ ID NO: 11345 - protein, 9 aa, Homo sapiens
RISSKSLKV

SEQ ID NO: 11346 - protein, 9 aa, Homo sapiens
RIYESHVGI

SEQ ID NO: 11347 - protein, 10 aa, Homo sapiens
RLAAIVAKQV

SEQ ID NO: 11348 - protein, 11 aa, Homo sapiens
RLAAIVAKQVL

SEQ ID NO: 11349 - protein, 9 aa, Homo sapiens
RLAECVKQV

SEQ ID NO: 11350 - protein, 9 aa, Homo sapiens
RLAHLGVQV

SEQ ID NO: 11351 - protein, 9 aa, Homo sapiens
RLALFNPDV

SEQ ID NO: 11352 - protein, 9 aa, Homo sapiens
RLAPLIQVI

SEQ ID NO: 11353 - protein, 9 aa, Homo sapiens
RLAQICSSI

SEQ ID NO: 11354 - protein, 11 aa, Homo sapiens
RLFPVPGSGLV

SEQ ID NO: 11355 - protein, 9 aa, Homo sapiens
RLGDKILQV

SEQ ID NO: 11356 - protein, 8 aa, Homo sapiens
RLGDVVRV

SEQ ID NO: 11357 - protein, 8 aa, Homo sapiens
RLGFTPSV

SEQ ID NO: 11358 - protein, 8 aa, Homo sapiens
RLGHAPCV

SEQ ID NO: 11359 - protein, 9 aa, Homo sapiens
RLGPVPPGL

SEQ ID NO: 11360 - protein, 10 aa, Homo sapiens
RLINLVGESL

SEQ ID NO: 11361 - protein, 9 aa, Homo sapiens
RLKEAFDYI

SEQ ID NO: 11362 - protein, 9 aa, Homo sapiens
RLLEQGIRV

SEQ ID NO: 11363 - protein, 11 aa, Homo sapiens
RLLNVEVPQKV

SEQ ID NO: 11364 - protein, 9 aa, Homo sapiens
RLLQQVSQI

SEQ ID NO: 11365 - protein, 11 aa, Homo sapiens
RLMANPEALKI

SEQ ID NO: 11366 - protein, 8 aa, Homo sapiens
RLNDSPTL

SEQ ID NO: 11367 - protein, 9 aa, Homo sapiens
RLNIPVSQV

SEQ ID NO: 11368 - protein, 9 aa, Homo sapiens
RLNKKVVLL

SEQ ID NO: 11369 - protein, 9 aa, Homo sapiens
RLNPEMLQI

SEQ ID NO: 11370 - protein, 9 aa, Homo sapiens
RLNPKALTL

SEQ ID NO: 11371 - protein, 10 aa, Homo sapiens
RLPEHCIEYV

SEQ ID NO: 11372 - protein, 9 aa, Homo sapiens
RLPPEVNRI

SEQ ID NO: 11373 - protein, 9 aa, Homo sapiens
RLPRSVTTV

SEQ ID NO: 11374 - protein, 9 aa, Homo sapiens
RLQEASQTI

SEQ ID NO: 11375 - protein, 9 aa, Homo sapiens
RLQKLHTSI

SEQ ID NO: 11376 - protein, 9 aa, Homo sapiens
RLQTALLVV

SEQ ID NO: 11377 - protein, 9 aa, Homo sapiens
RLRSFTTTI

SEQ ID NO: 11378 - protein, 9 aa, Homo sapiens
RLTDLCTKI

SEQ ID NO: 11379 - protein, 9 aa, Homo sapiens
RLTDTDAAI

SEQ ID NO: 11380 - protein, 9 aa, Homo sapiens
RLTEICTKI

SEQ ID NO: 11381 - protein, 9 aa, Homo sapiens
RLVEGLREA

SEQ ID NO: 11382 - protein, 9 aa, Homo sapiens
RLVQHDLQV

SEQ ID NO: 11383 - protein, 9 aa, Homo sapiens
RLYGLGTGV

SEQ ID NO: 11384 - protein, 9 aa, Homo sapiens
RLYKDDQLL

SEQ ID NO: 11385 - protein, 9 aa, Homo sapiens
RLYTGMHTV

SEQ ID NO: 11386 - protein, 9 aa, Homo sapiens
RMIGQICEV

SEQ ID NO: 11387 - protein, 9 aa, Homo sapiens
RQADFVQVL

SEQ ID NO: 11388 - protein, 10 aa, Homo sapiens
RQAEITRLLL

SEQ ID NO: 11389 - protein, 9 aa, Homo sapiens
RQDRLTVGV

SEQ ID NO: 11390 - protein, 9 aa, Homo sapiens
RQLEAIVRI

SEQ ID NO: 11391 - protein, 9 aa, Homo sapiens
RQLEVLQSI

SEQ ID NO: 11392 - protein, 9 aa, Homo sapiens
RQLTEKLTV

SEQ ID NO: 11393 - protein, 10 aa, Homo sapiens
RQMDIIVSEV

SEQ ID NO: 11394 - protein, 9 aa, Homo sapiens
RQMEKDETV

SEQ ID NO: 11395 - protein, 9 aa, Homo sapiens
RQPYYATRV

SEQ ID NO: 11396 - protein, 9 aa, Homo sapiens
RQSDLLVKL

SEQ ID NO: 11397 - protein, 9 aa, Homo sapiens
RQTGKILKV

SEQ ID NO: 11398 - protein, 9 aa, Homo sapiens
RQTYFLPVI

SEQ ID NO: 11399 - protein, 9 aa, Homo sapiens
RQWDYTEKL

SEQ ID NO: 11400 - protein, 9 aa, Homo sapiens
RQWKKISAI

SEQ ID NO: 11401 - protein, 9 aa, Homo sapiens
RQWLAIQKL

SEQ ID NO: 11402 - protein, 9 aa, Homo sapiens
RQYTEAISV

SEQ ID NO: 11403 - protein, 9 aa, Homo sapiens
RTLDLPIYV

SEQ ID NO: 11404 - protein, 9 aa, Homo sapiens
RVLPNLPCV

SEQ ID NO: 11405 - protein, 9 aa, Homo sapiens
RVLQNLLTI

SEQ ID NO: 11406 - protein, 9 aa, Homo sapiens
RVMSGKLTV

SEQ ID NO: 11407 - protein, 9 aa, Homo sapiens
RVTECLTTV

SEQ ID NO: 11408 - protein, 9 aa, Homo sapiens
SAIHTIAHL

SEQ ID NO: 11409 - protein, 9 aa, Homo sapiens
SASKSVLEV

SEQ ID NO: 11410 - protein, 9 aa, Homo sapiens
SIAECLTYL

SEQ ID NO: 11411 - protein, 9 aa, Homo sapiens
SIARVLTVI

SEQ ID NO: 11412 - protein, 10 aa, Homo sapiens
SLAECGAQGV

SEQ ID NO: 11413 - protein, 9 aa, Homo sapiens
SLAEVQCHL

SEQ ID NO: 11414 - protein, 9 aa, Homo sapiens
SLAPVLCGI

SEQ ID NO: 11415 - protein, 9 aa, Homo sapiens
SLDEAQFVL

SEQ ID NO: 11416 - protein, 9 aa, Homo sapiens
SLDGHLQAV

SEQ ID NO: 11417 - protein, 9 aa, Homo sapiens
SLDGRQIRV

SEQ ID NO: 11418 - protein, 9 aa, Homo sapiens
SLFDAVSSL

SEQ ID NO: 11419 - protein, 10 aa, Homo sapiens
SLGPPGPPGL

SEQ ID NO: 11420 - protein, 9 aa, Homo sapiens
SLHGTVMKI

SEQ ID NO: 11421 - protein, 9 aa, Homo sapiens
SLIRLVPKL

SEQ ID NO: 11422 - protein, 11 aa, Homo sapiens
SLLPADCQIHL

SEQ ID NO: 11423 - protein, 9 aa, Homo sapiens
SLLPVMQHL

SEQ ID NO: 11424 - protein, 9 aa, Homo sapiens
SLQEYIVSA

SEQ ID NO: 11425 - protein, 9 aa, Homo sapiens
SLSEYDQCL

SEQ ID NO: 11426 - protein, 9 aa, Homo sapiens
SLSGRPLKV

SEQ ID NO: 11427 - protein, 9 aa, Homo sapiens
SLSRVMIHV

SEQ ID NO: 11428 - protein, 9 aa, Homo sapiens
SLTDKVQEA

SEQ ID NO: 11429 - protein, 9 aa, Homo sapiens
SLTNTDLKV

SEQ ID NO: 11430 - protein, 9 aa, Homo sapiens
SLYVQQLKI

SEQ ID NO: 11431 - protein, 10 aa, Homo sapiens
SMIDCSMVQV

SEQ ID NO: 11432 - protein, 9 aa, Homo sapiens
SMPEQAHKV

SEQ ID NO: 11433 - protein, 9 aa, Homo sapiens
SQADCAVLI

SEQ ID NO: 11434 - protein, 9 aa, Homo sapiens
SQFGHVVDI

SEQ ID NO: 11435 - protein, 8 aa, Homo sapiens
SQFLYPKV

SEQ ID NO: 11436 - protein, 9 aa, Homo sapiens
SQFPGTQRL

SEQ ID NO: 11437 - protein, 9 aa, Homo sapiens
SQHDILQMI

SEQ ID NO: 11438 - protein, 9 aa, Homo sapiens
SQIKYAAKV

SEQ ID NO: 11439 - protein, 9 aa, Homo sapiens
SQIYPVVCV

SEQ ID NO: 11440 - protein, 9 aa, Homo sapiens
SQLDVPFKV

SEQ ID NO: 11441 - protein, 8 aa, Homo sapiens
SQLKLWNV

SEQ ID NO: 11442 - protein, 9 aa, Homo sapiens
SQPSKTLFV

SEQ ID NO: 11443 - protein, 9 aa, Homo sapiens
SQSNMTQKV

SEQ ID NO: 11444 - protein, 9 aa, Homo sapiens
SQTDGTLKI

SEQ ID NO: 11445 - protein, 9 aa, Homo sapiens
SQVTFPIRV

SEQ ID NO: 11446 - protein, 9 aa, Homo sapiens
SQWSLQHEI

SEQ ID NO: 11447 - protein, 9 aa, Homo sapiens
SSTSHVPEV

SEQ ID NO: 11448 - protein, 9 aa, Homo sapiens
SVALVIHNV

SEQ ID NO: 11449 - protein, 11 aa, Homo sapiens
SVFPGARLLTI

SEQ ID NO: 11450 - protein, 9 aa, Homo sapiens
SVISHLLRV

SEQ ID NO: 11451 - protein, 9 aa, Homo sapiens
SVTDLAFKV

SEQ ID NO: 11452 - protein, 9 aa, Homo sapiens
SVWFGPKEV

SEQ ID NO: 11453 - protein, 9 aa, Homo sapiens
TIAGVPQSV

SEQ ID NO: 11454 - protein, 9 aa, Homo sapiens
TIANVPILI

SEQ ID NO: 11455 - protein, 9 aa, Homo sapiens
TIFGKAHSL

SEQ ID NO: 11456 - protein, 9 aa, Homo sapiens
TILDKAMVL

SEQ ID NO: 11457 - protein, 9 aa, Homo sapiens
TISAYYARV

SEQ ID NO: 11458 - protein, 9 aa, Homo sapiens
TLAPATSIL

SEQ ID NO: 11459 - protein, 9 aa, Homo sapiens
TLENGVPCV

SEQ ID NO: 11460 - protein, 9 aa, Homo sapiens
TLFPKDVQL

SEQ ID NO: 11461 - protein, 9 aa, Homo sapiens
TLHAAVLQI

SEQ ID NO: 11462 - protein, 9 aa, Homo sapiens
TLICDVHSI

SEQ ID NO: 11463 - protein, 9 aa, Homo sapiens
TLLDRNTEL

SEQ ID NO: 11464 - protein, 9 aa, Homo sapiens
TLLEALDCI

SEQ ID NO: 11465 - protein, 9 aa, Homo sapiens
TLLSCKVQL

SEQ ID NO: 11466 - protein, 9 aa, Homo sapiens
TLLSNSISV

SEQ ID NO: 11467 - protein, 9 aa, Homo sapiens
TLMSLPTKI

SEQ ID NO: 11468 - protein, 10 aa, Homo sapiens
TLPKISPSSL

SEQ ID NO: 11469 - protein, 9 aa, Homo sapiens
TLPYIKQEV

SEQ ID NO: 11470 - protein, 9 aa, Homo sapiens
TLQNTVDIL

SEQ ID NO: 11471 - protein, 9 aa, Homo sapiens
TLSSIRHMI

SEQ ID NO: 11472 - protein, 9 aa, Homo sapiens
TLTDCVVVV

SEQ ID NO: 11473 - protein, 9 aa, Homo sapiens
TLWVDPCEV

SEQ ID NO: 11474 - protein, 9 aa, Homo sapiens
TQAGIVAHI

SEQ ID NO: 11475 - protein, 9 aa, Homo sapiens
TQLDVPHVI

SEQ ID NO: 11476 - protein, 9 aa, Homo sapiens
TQPPSHFSV

SEQ ID NO: 11477 - protein, 9 aa, Homo sapiens
TQPTHSWKV

SEQ ID NO: 11478 - protein, 9 aa, Homo sapiens
TTNGGILTV

SEQ ID NO: 11479 - protein, 9 aa, Homo sapiens
TVLATVQAL

SEQ ID NO: 11480 - protein, 9 aa, Homo sapiens
TVNEIVLKV

SEQ ID NO: 11481 - protein, 10 aa, Homo sapiens
VIACDGIWNV

SEQ ID NO: 11482 - protein, 9 aa, Homo sapiens
VIHATVTSV

SEQ ID NO: 11483 - protein, 9 aa, Homo sapiens
VILDPVHSV

SEQ ID NO: 11484 - protein, 9 aa, Homo sapiens
VILRDSHGV

SEQ ID NO: 11485 - protein, 9 aa, Homo sapiens
VLADACWAL

SEQ ID NO: 11486 - protein, 9 aa, Homo sapiens
VLADFEAGL

SEQ ID NO: 11487 - protein, 10 aa, Homo sapiens
VLADQGVCCI

SEQ ID NO: 11488 - protein, 10 aa, Homo sapiens
VLADRGVCLI

SEQ ID NO: 11489 - protein, 9 aa, Homo sapiens
VLAEIPQQV

SEQ ID NO: 11490 - protein, 9 aa, Homo sapiens
VLAPHLTRA

SEQ ID NO: 11491 - protein, 9 aa, Homo sapiens
VLESTMVCV

SEQ ID NO: 11492 - protein, 9 aa, Homo sapiens
VLIKDTTAL

SEQ ID NO: 11493 - protein, 10 aa, Homo sapiens
VLLDVCPLTL

SEQ ID NO: 11494 - protein, 10 aa, Homo sapiens
VLLHEVPHEV

SEQ ID NO: 11495 - protein, 12 aa, Homo sapiens
VLLPKKTESHKA

SEQ ID NO: 11496 - protein, 9 aa, Homo sapiens
VLLTHCHSL

SEQ ID NO: 11497 - protein, 9 aa, Homo sapiens
VLMGHVAAV

SEQ ID NO: 11498 - protein, 11 aa, Homo sapiens
VLPDSGHLHPL

SEQ ID NO: 11499 - protein, 9 aa, Homo sapiens
VLPERYSSL

SEQ ID NO: 11500 - protein, 9 aa, Homo sapiens
VLPPPPTTL

SEQ ID NO: 11501 - protein, 9 aa, Homo sapiens
VLPRDTASL

SEQ ID NO: 11502 - protein, 9 aa, Homo sapiens
VLPVPPLSV

SEQ ID NO: 11503 - protein, 9 aa, Homo sapiens
VLPVYMNCL

SEQ ID NO: 11504 - protein, 9 aa, Homo sapiens
VLQPYEHLI

SEQ ID NO: 11505 - protein, 9 aa, Homo sapiens
VLSECSPLM

SEQ ID NO: 11506 - protein, 10 aa, Homo sapiens
VLSSLPLNSL

SEQ ID NO: 11507 - protein, 10 aa, Homo sapiens
VLTDLPCVGV

SEQ ID NO: 11508 - protein, 9 aa, Homo sapiens
VLYPGCDTL

SEQ ID NO: 11509 - protein, 9 aa, Homo sapiens
VQAPVIQQV

SEQ ID NO: 11510 - protein, 10 aa, Homo sapiens
VQIKDVNLEV

SEQ ID NO: 11511 - protein, 9 aa, Homo sapiens
VQPLELPMV

SEQ ID NO: 11512 - protein, 9 aa, Homo sapiens
VVDGHKLEV

SEQ ID NO: 11513 - protein, 9 aa, Homo sapiens
VVSGVVSKV

SEQ ID NO: 11514 - protein, 9 aa, Homo sapiens
WLLEQTSHV

SEQ ID NO: 11515 - protein, 9 aa, Homo sapiens
WLLQKNPQL

SEQ ID NO: 11516 - protein, 9 aa, Homo sapiens
WLSTSIPEA

SEQ ID NO: 11517 - protein, 9 aa, Homo sapiens
YAIGNAPEL

SEQ ID NO: 11518 - protein, 9 aa, Homo sapiens
YIASLPFQV

SEQ ID NO: 11519 - protein, 9 aa, Homo sapiens
YIFTTPKSV

SEQ ID NO: 11520 - protein, 9 aa, Homo sapiens
YIVPCLHEV

SEQ ID NO: 11521 - protein, 9 aa, Homo sapiens
YLDRYLSCV

SEQ ID NO: 11522 - protein, 9 aa, Homo sapiens
YLFKCPQSV

SEQ ID NO: 11523 - protein, 9 aa, Homo sapiens
YLFPGHPPT

SEQ ID NO: 11524 - protein, 9 aa, Homo sapiens
YLHDQNPDA

SEQ ID NO: 11525 - protein, 9 aa, Homo sapiens
YLLDGSCMV

SEQ ID NO: 11526 - protein, 11 aa, Homo sapiens
YLLDIGCGTGL

SEQ ID NO: 11527 - protein, 9 aa, Homo sapiens
YLLHGLECV

SEQ ID NO: 11528 - protein, 9 aa, Homo sapiens
YLLQYATLL

SEQ ID NO: 11529 - protein, 10 aa, Homo sapiens
YLLVRRVLHL

SEQ ID NO: 11530 - protein, 9 aa, Homo sapiens
YLPDKLPKV

SEQ ID NO: 11531 - protein, 9 aa, Homo sapiens
YLPPGVIAL

SEQ ID NO: 11532 - protein, 9 aa, Homo sapiens
YLQCKLEQL

SEQ ID NO: 11533 - protein, 9 aa, Homo sapiens
YLQSEPCYV

SEQ ID NO: 11534 - protein, 9 aa, Homo sapiens
YLQSITPCL

SEQ ID NO: 11535 - protein, 9 aa, Homo sapiens
YLSDFICCL

SEQ ID NO: 11536 - protein, 11 aa, Homo sapiens
YLSDPCPGLYL

SEQ ID NO: 11537 - protein, 9 aa, Homo sapiens
YLSTCIDQV

SEQ ID NO: 11538 - protein, 9 aa, Homo sapiens
YLYCGQEGL

SEQ ID NO: 11539 - protein, 10 aa, Homo sapiens
YMLPDGTYCL

SEQ ID NO: 11540 - protein, 9 aa, Homo sapiens
YQHAIEESV

SEQ ID NO: 11541 - protein, 8 aa, Homo sapiens
YQIAVTKV

SEQ ID NO: 11542 - protein, 9 aa, Homo sapiens
YQPQAIFRV

SEQ ID NO: 11543 - protein, 9 aa, Homo sapiens
YQTPLELKL

SEQ ID NO: 11544 - protein, 9 aa, Homo sapiens
YTFDPVTKV

SEQ ID NO: 11545 - protein, 9 aa, Homo sapiens
YTSNHIWKL

SEQ ID NO: 11546 - protein, 9 aa, Homo sapiens
YVDESRECV

SEQ ID NO: 11547 - protein, 9 aa, Homo sapiens
YVLEHNLHL

SEQ ID NO: 11548 - protein, 9 aa, Homo sapiens
YVMDTRPKL

SEQ ID NO: 11549 - protein, 11 aa, Hepatitis E virus
LRSLFWNEPAI

SEQ ID NO: 11550 - protein, 11 aa, Hepatitis E virus
YVSDTVTFVNV

SEQ ID NO: 11551 - protein, 9 aa, JC polyomavirus
SLMNVHSNG

SEQ ID NO: 11552 - protein, 9 aa, JC polyomavirus
VKNPYPISF

SEQ ID NO: 11553 - protein, 8 aa, Homo sapiens
ALAAALVV

SEQ ID NO: 11554 - protein, 8 aa, Homo sapiens
ALAAFLGL

SEQ ID NO: 11555 - protein, 11 aa, Homo sapiens
ALAALPSGDRV

SEQ ID NO: 11556 - protein, 8 aa, Homo sapiens
ALAGLSPV

SEQ ID NO: 11557 - protein, 8 aa, Homo sapiens
ALIGGPPV

SEQ ID NO: 11558 - protein, 8 aa, Homo sapiens
ALISKNPV

SEQ ID NO: 11559 - protein, 8 aa, Homo sapiens
ALLGIPKV

SEQ ID NO: 11560 - protein, 8 aa, Homo sapiens
ALVSIIKV

SEQ ID NO: 11561 - protein, 11 aa, Homo sapiens
AVAALPSGDRV

SEQ ID NO: 11562 - protein, 8 aa, Homo sapiens
GLGPVAAV

SEQ ID NO: 11563 - protein, 8 aa, Homo sapiens
GLLAIVKV

SEQ ID NO: 11564 - protein, 11 aa, Homo sapiens
IHDLLELKGPL

SEQ ID NO: 11565 - protein, 11 aa, Homo sapiens
IHDLLEPKGPL

SEQ ID NO: 11566 - protein, 9 aa, Homo sapiens
LLAAVAALL

SEQ ID NO: 11567 - protein, 8 aa, Homo sapiens
LLAGPPGV

SEQ ID NO: 11568 - protein, 11 aa, Homo sapiens
LLFPYILPPKA

SEQ ID NO: 11569 - protein, 10 aa, Homo sapiens
LLGCPVPLGV

SEQ ID NO: 11570 - protein, 8 aa, Homo sapiens
LLGPAPGV

SEQ ID NO: 11571 - protein, 11 aa, Homo sapiens
LLLELAGVTHV

SEQ ID NO: 11572 - protein, 9 aa, Homo sapiens
LLLPALAGA

SEQ ID NO: 11573 - protein, 9 aa, Homo sapiens
LLLRSPAGV

SEQ ID NO: 11574 - protein, 9 aa, Homo sapiens
LLSAVLPSV

SEQ ID NO: 11575 - protein, 11 aa, Homo sapiens
LLWRKLLWHQV

SEQ ID NO: 11576 - protein, 10 aa, Homo sapiens
SLLGLALLAV

SEQ ID NO: 11577 - protein, 9 aa, Human papillomavirus type 16
KISEYRHYV

SEQ ID NO: 11578 - protein, 10 aa, Hepatitis C virus
KLKSLGLNAV

SEQ ID NO: 11579 - protein, 9 aa, Human papillomavirus type 16
KLPQLCTEV

SEQ ID NO: 11580 - protein, 10 aa, Hepatitis C virus
QLRSLGLNAV

SEQ ID NO: 11581 - protein, 10 aa, Hepatitis C virus
QLRTLGLNAV

SEQ ID NO: 11582 - protein, 10 aa, Hepatitis C virus
QLSSLGLNAV

SEQ ID NO: 11583 - protein, 10 aa, Hepatitis C virus
QLTSLGLNAV

SEQ ID NO: 11584 - protein, 10 aa, Human papillomavirus type 16
QLYNKPLCDV

SEQ ID NO: 11585 - protein, 10 aa, Human papillomavirus type 16
QQYNKPLCDL

SEQ ID NO: 11586 - protein, 10 aa, Human papillomavirus type 16
RTLEDLLMGV

SEQ ID NO: 11587 - protein, 9 aa, Human papillomavirus type 16
TLHEYMLDV

SEQ ID NO: 11588 - protein, 9 aa, Human papillomavirus type 16
YMLDLQPEV

SEQ ID NO: 11589 - protein, 9 aa, Yellow fever virus 17D
GMVAPLYGV

SEQ ID NO: 11590 - protein, 11 aa, Homo sapiens
  misc_feature (10)..(10): Xaa can be any naturally occurring amino acid
MLYQHLLPLXM

SEQ ID NO: 11591 - protein, 8 aa, Homo sapiens
LIGEVFVL

SEQ ID NO: 11592 - protein, 8 aa, Homo sapiens
LLGEVFEL

SEQ ID NO: 11593 - protein, 8 aa, Homo sapiens
LPGEVFAI

SEQ ID NO: 11594 - protein, 8 aa, Homo sapiens
LVGEVWGL

SEQ ID NO: 11595 - protein, 8 aa, Homo sapiens
MEGEVWGL

SEQ ID NO: 11596 - protein, 9 aa, Homo sapiens
MLGGEVFYV

SEQ ID NO: 11597 - protein, 9 aa, Homo sapiens
MLIGEVFNI

SEQ ID NO: 11598 - protein, 9 aa, Homo sapiens
MLPGEVFAI

SEQ ID NO: 11599 - protein, 9 aa, Homo sapiens
AMFWSVPTV

SEQ ID NO: 11600 - protein, 10 aa, Homo sapiens
ASLGPTIEEV

SEQ ID NO: 11601 - protein, 9 aa, Homo sapiens
CLNEYHLFL

SEQ ID NO: 11602 - protein, 10 aa, Homo sapiens
EIFDGNVAHI

SEQ ID NO: 11603 - protein, 9 aa, Homo sapiens
EIIHEIAVL

SEQ ID NO: 11604 - protein, 9 aa, Homo sapiens
EVIALLHSL

SEQ ID NO: 11605 - protein, 9 aa, Homo sapiens
EVIRELAGI

SEQ ID NO: 11606 - protein, 9 aa, Homo sapiens
FLAPVKTEV

SEQ ID NO: 11607 - protein, 9 aa, Homo sapiens
FLYNLLTRV

SEQ ID NO: 11608 - protein, 9 aa, Homo sapiens
HLYASLSRV

SEQ ID NO: 11609 - protein, 9 aa, Homo sapiens
IILVAVPHV

SEQ ID NO: 11610 - protein, 9 aa, Homo sapiens
KLMNIQQKL

SEQ ID NO: 11611 - protein, 10 aa, Homo sapiens
KMAGIGIREA

SEQ ID NO: 11612 - protein, 9 aa, Homo sapiens
KMIGNHLWV

SEQ ID NO: 11613 - protein, 9 aa, Homo sapiens
KTLLVSEEL

SEQ ID NO: 11614 - protein, 9 aa, Homo sapiens
LDINALQEL

SEQ ID NO: 11615 - protein, 9 aa, Homo sapiens
LVDKLQLKV

SEQ ID NO: 11616 - protein, 9 aa, Homo sapiens
MLGEQLFPL

SEQ ID NO: 11617 - protein, 9 aa, Homo sapiens
QIDPTIQRV

SEQ ID NO: 11618 - protein, 9 aa, Homo sapiens
QLSCISTYV

SEQ ID NO: 11619 - protein, 9 aa, Homo sapiens
RLLPLPLGV

SEQ ID NO: 11620 - protein, 8 aa, Homo sapiens
RLQTALLV

SEQ ID NO: 11621 - protein, 9 aa, Homo sapiens
RVIDYAVKI

SEQ ID NO: 11622 - protein, 9 aa, Homo sapiens
RVVELQQTL

SEQ ID NO: 11623 - protein, 9 aa, Homo sapiens
TTRPALKEL

SEQ ID NO: 11624 - protein, 9 aa, Homo sapiens
TVYPMERLV

SEQ ID NO: 11625 - protein, 9 aa, Homo sapiens
YLPKIQLVI

SEQ ID NO: 11626 - protein, 9 aa, Leishmania donovani
FLQLLLVTL

SEQ ID NO: 11627 - protein, 9 aa, Leishmania donovani
FMGDIHQPL

SEQ ID NO: 11628 - protein, 9 aa, Leishmania donovani
LEATYASTL

SEQ ID NO: 11629 - protein, 9 aa, Leishmania donovani
LLSTAALPV

SEQ ID NO: 11630 - protein, 9 aa, Leishmania donovani
REANLSHYV

SEQ ID NO: 11631 - protein, 10 aa, Homo sapiens
KLAGIGILTV

SEQ ID NO: 11632 - protein, 9 aa, Homo sapiens
RIADLSYTV

SEQ ID NO: 11633 - protein, 9 aa, Homo sapiens
RILDYVINL

SEQ ID NO: 11634 - protein, 9 aa, Homo sapiens
SLASVFVRL

SEQ ID NO: 11635 - protein, 9 aa, Homo sapiens
TLLGKEIKI

SEQ ID NO: 11636 - protein, 9 aa, Homo sapiens
AIFSAIIFL

SEQ ID NO: 11637 - protein, 9 aa, Homo sapiens
AIWDGLILL

SEQ ID NO: 11638 - protein, 9 aa, Homo sapiens
ALADTLVLL

SEQ ID NO: 11639 - protein, 9 aa, Homo sapiens
ALAHNLLVK

SEQ ID NO: 11640 - protein, 9 aa, Homo sapiens
ALAWLDVTL

SEQ ID NO: 11641 - protein, 10 aa, Homo sapiens
ALDAGAVYTL

SEQ ID NO: 11642 - protein, 9 aa, Homo sapiens
ALDKLNEAI

SEQ ID NO: 11643 - protein, 9 aa, Homo sapiens
ALFETLIQL

SEQ ID NO: 11644 - protein, 11 aa, Homo sapiens
  misc_feature (10)..(10): Xaa can be any naturally occurring amino acid
ALFGIPMALXM

SEQ ID NO: 11645 - protein, 9 aa, Homo sapiens
ALFSFLYHL

SEQ ID NO: 11646 - protein, 9 aa, Homo sapiens
ALLADEFAL

SEQ ID NO: 11647 - protein, 9 aa, Homo sapiens
ALLAKILQI

SEQ ID NO: 11648 - protein, 9 aa, Homo sapiens
ALLALLPEL

SEQ ID NO: 11649 - protein, 9 aa, Homo sapiens
ALLDFLWDL

SEQ ID NO: 11650 - protein, 12 aa, Homo sapiens
ALLDPEVLSIFV

SEQ ID NO: 11651 - protein, 11 aa, Homo sapiens
ALLDVSNNYGI

SEQ ID NO: 11652 - protein, 9 aa, Homo sapiens
ALLEGLTVV

SEQ ID NO: 11653 - protein, 9 aa, Homo sapiens
ALLEGVKNV

SEQ ID NO: 11654 - protein, 9 aa, Homo sapiens
ALLPGNFTV

SEQ ID NO: 11655 - protein, 9 aa, Homo sapiens
ALLPVDIFL

SEQ ID NO: 11656 - protein, 9 aa, Homo sapiens
ALLRLLPGL

SEQ ID NO: 11657 - protein, 10 aa, Homo sapiens
ALLSLHFLFV

SEQ ID NO: 11658 - protein, 9 aa, Homo sapiens
ALMDFAYTA

SEQ ID NO: 11659 - protein, 11 aa, Homo sapiens
ALPEVLAVIQV

SEQ ID NO: 11660 - protein, 9 aa, Homo sapiens
ALQALVVTL

SEQ ID NO: 11661 - protein, 9 aa, Homo sapiens
ALQDFLLSV

SEQ ID NO: 11662 - protein, 11 aa, Homo sapiens
ALQEAIDAIFL

SEQ ID NO: 11663 - protein, 9 aa, Homo sapiens
ALQESIPDI

SEQ ID NO: 11664 - protein, 10 aa, Homo sapiens
ALQPGTLQLI

SEQ ID NO: 11665 - protein, 9 aa, Homo sapiens
ALQTIQLFL

SEQ ID NO: 11666 - protein, 9 aa, Homo sapiens
ALQTKLETL

SEQ ID NO: 11667 - protein, 9 aa, Homo sapiens
ALSDYDLVL

SEQ ID NO: 11668 - protein, 17 aa, Homo sapiens
ALSEAMGLFCLCYSTLC

SEQ ID NO: 11669 - protein, 9 aa, Homo sapiens
ALSSLLVFL

SEQ ID NO: 11670 - protein, 15 aa, Homo sapiens
ALTDVILCVCYSTLC

SEQ ID NO: 11671 - protein, 9 aa, Homo sapiens
ALTWLIPTL

SEQ ID NO: 11672 - protein, 9 aa, Homo sapiens
ALVHITLIL

SEQ ID NO: 11673 - protein, 10 aa, Homo sapiens
ALVQITLPTV

SEQ ID NO: 11674 - protein, 10 aa, Homo sapiens
ALWVSQPPEI

SEQ ID NO: 11675 - protein, 9 aa, Homo sapiens
ALYAVIEKA

SEQ ID NO: 11676 - protein, 10 aa, Homo sapiens
ALYEYQPLQI

SEQ ID NO: 11677 - protein, 10 aa, Homo sapiens
ALYTGFSILV

SEQ ID NO: 11678 - protein, 10 aa, Homo sapiens
APGNLSLPIP

SEQ ID NO: 11679 - protein, 9 aa, Homo sapiens
AQILELPYA

SEQ ID NO: 11680 - protein, 9 aa, Homo sapiens
AVLGFSFRL

SEQ ID NO: 11681 - protein, 10 aa, Homo sapiens
AVLQQHHVKL

SEQ ID NO: 11682 - protein, 11 aa, Homo sapiens
AVMAPRTLVLL

SEQ ID NO: 11683 - protein, 12 aa, Homo sapiens
AVVEPYNSILTT

SEQ ID NO: 11684 - protein, 17 aa, Homo sapiens
CLIKEVDIYTVCYSTLC

SEQ ID NO: 11685 - protein, 15 aa, Homo sapiens
CLYEIYPELCYSTLC

SEQ ID NO: 11686 - protein, 17 aa, Homo sapiens
CLYELPENIRVCYSTLC

SEQ ID NO: 11687 - protein, 17 aa, Homo sapiens
CLYPHIDKQYLCYSTLC

SEQ ID NO: 11688 - protein, 9 aa, Homo sapiens
EAVPYLEFI

SEQ ID NO: 11689 - protein, 9 aa, Homo sapiens
EIQYLKDLI

SEQ ID NO: 11690 - protein, 9 aa, Homo sapiens
FAMEIDPSL

SEQ ID NO: 11691 - protein, 9 aa, Homo sapiens
FIFDGLHKA

SEQ ID NO: 11692 - protein, 10 aa, Homo sapiens
FIYQGKIPIA

SEQ ID NO: 11693 - protein, 9 aa, Homo sapiens
FLASILEEL

SEQ ID NO: 11694 - protein, 9 aa, Homo sapiens
FLDIVELLL

SEQ ID NO: 11695 - protein, 10 aa, Homo sapiens
FLEGQIHPEL

SEQ ID NO: 11696 - protein, 9 aa, Homo sapiens
FLFQEVLVI

SEQ ID NO: 11697 - protein, 9 aa, Homo sapiens
FLFQFIPYM

SEQ ID NO: 11698 - protein, 8 aa, Homo sapiens
FLFRITQV

SEQ ID NO: 11699 - protein, 9 aa, Homo sapiens
FLFVDPELV

SEQ ID NO: 11700 - protein, 11 aa, Homo sapiens
FLFVDPELVSA

SEQ ID NO: 11701 - protein, 17 aa, Homo sapiens
FLGCIGAVNEVCYSTLC

SEQ ID NO: 11702 - protein, 10 aa, Homo sapiens
FLGEKYIRRV

SEQ ID NO: 11703 - protein, 9 aa, Homo sapiens
FLGIHVFLV

SEQ ID NO: 11704 - protein, 9 aa, Homo sapiens
FLHAADVVL

SEQ ID NO: 11705 - protein, 9 aa, Homo sapiens
FLHAVDVVL

SEQ ID NO: 11706 - protein, 9 aa, Homo sapiens
FLHESLILL

SEQ ID NO: 11707 - protein, 9 aa, Homo sapiens
FLIAALDVL

SEQ ID NO: 11708 - protein, 10 aa, Homo sapiens
FLIGILLREV

SEQ ID NO: 11709 - protein, 9 aa, Homo sapiens
FLIPKFFEL

SEQ ID NO: 11710 - protein, 9 aa, Homo sapiens
FLLALGHFL

SEQ ID NO: 11711 - protein, 12 aa, Homo sapiens
FLLDIEDRIYQG

SEQ ID NO: 11712 - protein, 10 aa, Homo sapiens
FLLEDDIHVS

SEQ ID NO: 11713 - protein, 9 aa, Homo sapiens
FLLEIRQTL

SEQ ID NO: 11714 - protein, 12 aa, Homo sapiens
FLLEPGNLEVLL

SEQ ID NO: 11715 - protein, 10 aa, Homo sapiens
FLLIQLSCYF

SEQ ID NO: 11716 - protein, 11 aa, Homo sapiens
FLLLPDAEAQL

SEQ ID NO: 11717 - protein, 11 aa, Homo sapiens
FLLPHPGLKVA

SEQ ID NO: 11718 - protein, 9 aa, Homo sapiens
FLLPLIIVL

SEQ ID NO: 11719 - protein, 10 aa, Homo sapiens
FLLQINDILL

SEQ ID NO: 11720 - protein, 9 aa, Homo sapiens
FLLQLHWRL

SEQ ID NO: 11721 - protein, 10 aa, Homo sapiens
FLLQQHLISA

SEQ ID NO: 11722 - protein, 9 aa, Homo sapiens
FLMWFIETA

SEQ ID NO: 11723 - protein, 9 aa, Homo sapiens
FLPQVVVTV

SEQ ID NO: 11724 - protein, 9 aa, Homo sapiens
FLSDIPETV

SEQ ID NO: 11725 - protein, 11 aa, Homo sapiens
FLSEVWNTHTL

SEQ ID NO: 11726 - protein, 10 aa, Homo sapiens
FLSPQQPPLL

SEQ ID NO: 11727 - protein, 9 aa, Homo sapiens
FLTAAIILL

SEQ ID NO: 11728 - protein, 10 aa, Homo sapiens
FLTEIENLFL

SEQ ID NO: 11729 - protein, 10 aa, Homo sapiens
FLVEEEDLFL

SEQ ID NO: 11730 - protein, 9 aa, Homo sapiens
FLVLDVVYL

SEQ ID NO: 11731 - protein, 10 aa, Homo sapiens
FLWTEKFPSL

SEQ ID NO: 11732 - protein, 10 aa, Homo sapiens
FLYAAQPELL

SEQ ID NO: 11733 - protein, 9 aa, Homo sapiens
FLYGGELVL

SEQ ID NO: 11734 - protein, 10 aa, Homo sapiens
FLYPFPLALF

SEQ ID NO: 11735 - protein, 9 aa, Homo sapiens
FLYWHLEDL

SEQ ID NO: 11736 - protein, 9 aa, Homo sapiens
FMFQEALKL

SEQ ID NO: 11737 - protein, 10 aa, Homo sapiens
FMYNFQLVTL

SEQ ID NO: 11738 - protein, 10 aa, Homo sapiens
FQWDSDNIYL

SEQ ID NO: 11739 - protein, 9 aa, Homo sapiens
FVDEFLTYL

SEQ ID NO: 11740 - protein, 11 aa, Homo sapiens
FVQPFGPQYEV

SEQ ID NO: 11741 - protein, 11 aa, Homo sapiens
GILSVRDATKI

SEQ ID NO: 11742 - protein, 9 aa, Homo sapiens
GLAAFRAFL

SEQ ID NO: 11743 - protein, 9 aa, Homo sapiens
GLAEILVLV

SEQ ID NO: 11744 - protein, 9 aa, Homo sapiens
GLAHFVNEI

SEQ ID NO: 11745 - protein, 9 aa, Homo sapiens
GLDDLLLFL

SEQ ID NO: 11746 - protein, 11 aa, Homo sapiens
GLDSNLKYILV

SEQ ID NO: 11747 - protein, 9 aa, Homo sapiens
GLFDQQLAL

SEQ ID NO: 11748 - protein, 11 aa, Homo sapiens
GLFERDKLIFL

SEQ ID NO: 11749 - protein, 15 aa, Homo sapiens
GLFGVPLCLCYSTLC

SEQ ID NO: 11750 - protein, 9 aa, Homo sapiens
GLFGYLVFL

SEQ ID NO: 11751 - protein, 11 aa, Homo sapiens
GLIEDHFDVTV

SEQ ID NO: 11752 - protein, 11 aa, Homo sapiens
GLISFSDYIFL

SEQ ID NO: 11753 - protein, 11 aa, Homo sapiens
GLLDGGVDILL

SEQ ID NO: 11754 - protein, 9 aa, Homo sapiens
GLLEEAYTL

SEQ ID NO: 11755 - protein, 9 aa, Homo sapiens
GLLEGLVEV

SEQ ID NO: 11756 - protein, 11 aa, Homo sapiens
GLLPEHFLFLA

SEQ ID NO: 11757 - protein, 16 aa, Homo sapiens
GLLPGCVYHVCYSTLC

SEQ ID NO: 11758 - protein, 11 aa, Homo sapiens
GLLPSKIRINL

SEQ ID NO: 11759 - protein, 10 aa, Homo sapiens
GLSPLRPPSV

SEQ ID NO: 11760 - protein, 11 aa, Homo sapiens
GLTLAPGLSPA

SEQ ID NO: 11761 - protein, 11 aa, Homo sapiens
GLVTWDAALYL

SEQ ID NO: 11762 - protein, 11 aa, Homo sapiens
GVAPSRAIYFA

SEQ ID NO: 11763 - protein, 9 aa, Homo sapiens
GVQDFVPFV

SEQ ID NO: 11764 - protein, 9 aa, Homo sapiens
GYFDERYVL

SEQ ID NO: 11765 - protein, 9 aa, Homo sapiens
HLLDIYIQL

SEQ ID NO: 11766 - protein, 10 aa, Homo sapiens
HLLPGDELYL

SEQ ID NO: 11767 - protein, 12 aa, Homo sapiens
HLLSELEAAPYL

SEQ ID NO: 11768 - protein, 11 aa, Homo sapiens
HLMEENMIVYV

SEQ ID NO: 11769 - protein, 8 aa, Homo sapiens
IFVEAVLR

SEQ ID NO: 11770 - protein, 9 aa, Homo sapiens
ILADIVISA

SEQ ID NO: 11771 - protein, 11 aa, Homo sapiens
ILADKSSFISV

SEQ ID NO: 11772 - protein, 9 aa, Homo sapiens
ILAQLLPLL

SEQ ID NO: 11773 - protein, 9 aa, Homo sapiens
ILASIFETV

SEQ ID NO: 11774 - protein, 15 aa, Homo sapiens
ILDCIYNEVCYSTLC

SEQ ID NO: 11775 - protein, 9 aa, Homo sapiens
ILFPLRFTL

SEQ ID NO: 11776 - protein, 9 aa, Homo sapiens
ILIETKLVL

SEQ ID NO: 11777 - protein, 11 aa, Homo sapiens
ILISVDGKVYL

SEQ ID NO: 11778 - protein, 9 aa, Homo sapiens
ILLLPLHTG

SEQ ID NO: 11779 - protein, 11 aa, Homo sapiens
ILLNIEHRIML

SEQ ID NO: 11780 - protein, 11 aa, Homo sapiens
ILLQENGHIYV

SEQ ID NO: 11781 - protein, 11 aa, Homo sapiens
ILSESANRIFL

SEQ ID NO: 11782 - protein, 9 aa, Homo sapiens
ILSVFIPSL

SEQ ID NO: 11783 - protein, 9 aa, Homo sapiens
ILSWVSFWI

SEQ ID NO: 11784 - protein, 9 aa, Homo sapiens
ILWDTLLRL

SEQ ID NO: 11785 - protein, 9 aa, Homo sapiens
ILWSEAIFL

SEQ ID NO: 11786 - protein, 10 aa, Homo sapiens
ILWSERPTKV

SEQ ID NO: 11787 - protein, 9 aa, Homo sapiens
IMEDIILTL

SEQ ID NO: 11788 - protein, 11 aa, Homo sapiens
ISERYGPVFTI

SEQ ID NO: 11789 - protein, 9 aa, Homo sapiens
IVMETVPVL

SEQ ID NO: 11790 - protein, 9 aa, Homo sapiens
KLAAVVNNL

SEQ ID NO: 11791 - protein, 11 aa, Homo sapiens
KLAPITYPQGL

SEQ ID NO: 11792 - protein, 11 aa, Homo sapiens
KLDTVSSKIEL

SEQ ID NO: 11793 - protein, 9 aa, Homo sapiens
KLDWHRFNL

SEQ ID NO: 11794 - protein, 17 aa, Homo sapiens
KLFADAGLVCICYSTLC

SEQ ID NO: 11795 - protein, 14 aa, Homo sapiens
KLFNVTSTLDEAMN

SEQ ID NO: 11796 - protein, 16 aa, Homo sapiens
KLFNVTSTLRIDEAMN

SEQ ID NO: 11797 - protein, 11 aa, Homo sapiens
KLFSTETSLQV

SEQ ID NO: 11798 - protein, 11 aa, Homo sapiens
KLFTQIFGVGV

SEQ ID NO: 11799 - protein, 9 aa, Homo sapiens
KLIDYIYTA

SEQ ID NO: 11800 - protein, 11 aa, Homo sapiens
KLITKAEKIRL

SEQ ID NO: 11801 - protein, 12 aa, Homo sapiens
KLLDFQEFTLYL

SEQ ID NO: 11802 - protein, 15 aa, Homo sapiens
KLLNITNPVLDEAMN

SEQ ID NO: 11803 - protein, 14 aa, Homo sapiens
KLLNNLTSIDEAMN

SEQ ID NO: 11804 - protein, 9 aa, Homo sapiens
KLLQLQEVF

SEQ ID NO: 11805 - protein, 10 aa, Homo sapiens
KLNLPDYYKI

SEQ ID NO: 11806 - protein, 9 aa, Homo sapiens
KLSFIIRTV

SEQ ID NO: 11807 - protein, 9 aa, Homo sapiens
KLTDNLVAL

SEQ ID NO: 11808 - protein, 10 aa, Homo sapiens
KLTDQTLIYL

SEQ ID NO: 11809 - protein, 11 aa, Homo sapiens
KLWNVAAPLYL

SEQ ID NO: 11810 - protein, 9 aa, Homo sapiens
KLWSFFIYL

SEQ ID NO: 11811 - protein, 9 aa, Homo sapiens
KMMELFIRL

SEQ ID NO: 11812 - protein, 9 aa, Homo sapiens
KTFNLIPAV

SEQ ID NO: 11813 - protein, 10 aa, Homo sapiens
KVGNFKFIYV

SEQ ID NO: 11814 - protein, 10 aa, Homo sapiens
KVGSFKFIYV

SEQ ID NO: 11815 - protein, 8 aa, Homo sapiens
KVLPQELV

SEQ ID NO: 11816 - protein, 9 aa, Homo sapiens
LAQLRVLYL

SEQ ID NO: 11817 - protein, 11 aa, Homo sapiens
LEGLLPRLLSL

SEQ ID NO: 11818 - protein, 9 aa, Homo sapiens
LFKNAERML

SEQ ID NO: 11819 - protein, 8 aa, Homo sapiens
LFNENPYP

SEQ ID NO: 11820 - protein, 9 aa, Homo sapiens
LIQYHEPEL

SEQ ID NO: 11821 - protein, 11 aa, Homo sapiens
LLAGFAFLTGV

SEQ ID NO: 11822 - protein, 9 aa, Homo sapiens
LLAHVTLEL

SEQ ID NO: 11823 - protein, 9 aa, Homo sapiens
LLAPIVFVL

SEQ ID NO: 11824 - protein, 11 aa, Homo sapiens
LLDEPTNHLDL

SEQ ID NO: 11825 - protein, 11 aa, Homo sapiens
LLFEHSDIVVI

SEQ ID NO: 11826 - protein, 11 aa, Homo sapiens
LLFGKIGYYLV

SEQ ID NO: 11827 - protein, 9 aa, Homo sapiens
LLFTWEELI

SEQ ID NO: 11828 - protein, 8 aa, Homo sapiens
LLGQVFQV

SEQ ID NO: 11829 - protein, 12 aa, Homo sapiens
LLIDTQGVPYTV

SEQ ID NO: 11830 - protein, 9 aa, Homo sapiens
LLIGTDVSL

SEQ ID NO: 11831 - protein, 11 aa, Homo sapiens
LLLDERQDVHL

SEQ ID NO: 11832 - protein, 9 aa, Homo sapiens
LLLDIMPGL

SEQ ID NO: 11833 - protein, 10 aa, Homo sapiens
LLLDTEGFVK

SEQ ID NO: 11834 - protein, 11 aa, Homo sapiens
LLLEPGSLYIL

SEQ ID NO: 11835 - protein, 9 aa, Homo sapiens
LLLNELPSV

SEQ ID NO: 11836 - protein, 11 aa, Homo sapiens
LLLPETQSLPL

SEQ ID NO: 11837 - protein, 11 aa, Homo sapiens
LLLTDQHLYKL

SEQ ID NO: 11838 - protein, 11 aa, Homo sapiens
LLLYEEGLRVV

SEQ ID NO: 11839 - protein, 9 aa, Homo sapiens
LLNKSIIRV

SEQ ID NO: 11840 - protein, 9 aa, Homo sapiens
LLPDEIADV

SEQ ID NO: 11841 - protein, 11 aa, Homo sapiens
LLPGVDVLLEV

SEQ ID NO: 11842 - protein, 9 aa, Homo sapiens
LLPIKTVGV

SEQ ID NO: 11843 - protein, 9 aa, Homo sapiens
LLPNAVYKV

SEQ ID NO: 11844 - protein, 9 aa, Homo sapiens
LLSEHVIAI

SEQ ID NO: 11845 - protein, 9 aa, Homo sapiens
LLSGFVPLL

SEQ ID NO: 11846 - protein, 9 aa, Homo sapiens
LLSGQLPTI

SEQ ID NO: 11847 - protein, 9 aa, Homo sapiens
LLSSIVEEL

SEQ ID NO: 11848 - protein, 9 aa, Homo sapiens
LLSSVSIAL

SEQ ID NO: 11849 - protein, 9 aa, Homo sapiens
LLSSVTAEL

SEQ ID NO: 11850 - protein, 9 aa, Homo sapiens
LLTDILVFL

SEQ ID NO: 11851 - protein, 9 aa, Homo sapiens
LLWPGAALL

SEQ ID NO: 11852 - protein, 9 aa, Homo sapiens
LLYHYWIAV

SEQ ID NO: 11853 - protein, 9 aa, Homo sapiens
LLYVNVIGL

SEQ ID NO: 11854 - protein, 9 aa, Homo sapiens
LLYYGVVTL

SEQ ID NO: 11855 - protein, 10 aa, Homo sapiens
LMVELLKVFV

SEQ ID NO: 11856 - protein, 10 aa, Homo sapiens
LNGFDDVHFL

SEQ ID NO: 11857 - protein, 9 aa, Homo sapiens
LPINGNGKQ

SEQ ID NO: 11858 - protein, 9 aa, Homo sapiens
LQCNPPPGL

SEQ ID NO: 11859 - protein, 9 aa, Homo sapiens
LSFPCSLKI

SEQ ID NO: 11860 - protein, 9 aa, Homo sapiens
LSLDALLTV

SEQ ID NO: 11861 - protein, 9 aa, Homo sapiens
LVLPVLVFL

SEQ ID NO: 11862 - protein, 9 aa, Homo sapiens
MMMALLVPL

SEQ ID NO: 11863 - protein, 11 aa, Homo sapiens
MMTFDPQDILL

SEQ ID NO: 11864 - protein, 11 aa, Homo sapiens
NIIEAINELLV

SEQ ID NO: 11865 - protein, 9 aa, Homo sapiens
NILDFVVVV

SEQ ID NO: 11866 - protein, 9 aa, Homo sapiens
NLANVVLLL

SEQ ID NO: 11867 - protein, 9 aa, Homo sapiens
NLFHYLTEV

SEQ ID NO: 11868 - protein, 9 aa, Homo sapiens
NLFKLEVRL

SEQ ID NO: 11869 - protein, 9 aa, Homo sapiens
NLFSREFRA

SEQ ID NO: 11870 - protein, 9 aa, Homo sapiens
NLLELFVQL

SEQ ID NO: 11871 - protein, 15 aa, Homo sapiens
NLLNHSSMFLDEAMN

SEQ ID NO: 11872 - protein, 10 aa, Homo sapiens
NLLSKVLIYL

SEQ ID NO: 11873 - protein, 11 aa, Homo sapiens
  misc_feature (10)..(10): Xaa can be any naturally occurring amino acid
NLMELLIMIXM

SEQ ID NO: 11874 - protein, 11 aa, Homo sapiens
NLMPQMKTLYL

SEQ ID NO: 11875 - protein, 8 aa, Homo sapiens
PINGNGKQ

SEQ ID NO: 11876 - protein, 8 aa, Homo sapiens
PLGYEIQL

SEQ ID NO: 11877 - protein, 9 aa, Homo sapiens
PLLDLHIEL

SEQ ID NO: 11878 - protein, 9 aa, Homo sapiens
PVEQYLGVP

SEQ ID NO: 11879 - protein, 8 aa, Homo sapiens
PYHWPLLV

SEQ ID NO: 11880 - protein, 15 aa, Homo sapiens
QIMDYLLCLCYSTLC

SEQ ID NO: 11881 - protein, 10 aa, Homo sapiens
QLIDYKILGL

SEQ ID NO: 11882 - protein, 9 aa, Homo sapiens
QLLDLMHTL

SEQ ID NO: 11883 - protein, 9 aa, Homo sapiens
QLLGLIQRV

SEQ ID NO: 11884 - protein, 9 aa, Homo sapiens
QLWFREFFL

SEQ ID NO: 11885 - protein, 9 aa, Homo sapiens
QLYSVDVTL

SEQ ID NO: 11886 - protein, 9 aa, Homo sapiens
QMFQYFITV

SEQ ID NO: 11887 - protein, 11 aa, Homo sapiens
QMMQNPQILAA

SEQ ID NO: 11888 - protein, 10 aa, Homo sapiens
RIADGLPVAV

SEQ ID NO: 11889 - protein, 9 aa, Homo sapiens
RIIDIWILL

SEQ ID NO: 11890 - protein, 9 aa, Homo sapiens
RKSLKIIYI

SEQ ID NO: 11891 - protein, 9 aa, Homo sapiens
RLASTLVQV

SEQ ID NO: 11892 - protein, 9 aa, Homo sapiens
RLFEVPHEL

SEQ ID NO: 11893 - protein, 11 aa, Homo sapiens
RLFEVPHELVA

SEQ ID NO: 11894 - protein, 10 aa, Homo sapiens
RLIDDMVAQV

SEQ ID NO: 11895 - protein, 10 aa, Homo sapiens
RLIDIFIINL

SEQ ID NO: 11896 - protein, 11 aa, Homo sapiens
RLIQGDQILSV

SEQ ID NO: 11897 - protein, 10 aa, Homo sapiens
RLLAETHYQL

SEQ ID NO: 11898 - protein, 18 aa, Homo sapiens
RLLEQGCTDFTVCYSTLC

SEQ ID NO: 11899 - protein, 11 aa, Homo sapiens
RLLEVNQQSLL

SEQ ID NO: 11900 - protein, 11 aa, Homo sapiens
RLLEVTNTIRV

SEQ ID NO: 11901 - protein, 10 aa, Homo sapiens
RLLILENILL

SEQ ID NO: 11902 - protein, 9 aa, Homo sapiens
RLLQAVALV

SEQ ID NO: 11903 - protein, 9 aa, Homo sapiens
RLLTVLPSL

SEQ ID NO: 11904 - protein, 9 aa, Homo sapiens
RLLYQLVFL

SEQ ID NO: 11905 - protein, 11 aa, Homo sapiens
RLPNRALLVNV

SEQ ID NO: 11906 - protein, 9 aa, Homo sapiens
RLYEITIEV

SEQ ID NO: 11907 - protein, 11 aa, Homo sapiens
RMGGFGSIIQL

SEQ ID NO: 11908 - protein, 9 aa, Homo sapiens
RMLYMIEQV

SEQ ID NO: 11909 - protein, 10 aa, Homo sapiens
RVLDFDPMAV

SEQ ID NO: 11910 - protein, 9 aa, Homo sapiens
SDPFTHLAP

SEQ ID NO: 11911 - protein, 11 aa, Homo sapiens
SIGKPSLFISV

SEQ ID NO: 11912 - protein, 9 aa, Homo sapiens
SIIDWLNSV

SEQ ID NO: 11913 - protein, 9 aa, Homo sapiens
SIISNLDEV

SEQ ID NO: 11914 - protein, 14 aa, Homo sapiens
SIKNYLQFLDEAMN

SEQ ID NO: 11915 - protein, 9 aa, Homo sapiens
SILPVILRL

SEQ ID NO: 11916 - protein, 9 aa, Homo sapiens
SILQTLILV

SEQ ID NO: 11917 - protein, 9 aa, Homo sapiens
SILSLLIKL

SEQ ID NO: 11918 - protein, 9 aa, Homo sapiens
SILSLVTKI

SEQ ID NO: 11919 - protein, 9 aa, Homo sapiens
SLAGFLLSV

SEQ ID NO: 11920 - protein, 9 aa, Homo sapiens
SLAPIIVYI

SEQ ID NO: 11921 - protein, 12 aa, Homo sapiens
SLASFIPAVNDL

SEQ ID NO: 11922 - protein, 9 aa, Homo sapiens
SLDPTLPSV

SEQ ID NO: 11923 - protein, 9 aa, Homo sapiens
SLDWQMVFL

SEQ ID NO: 11924 - protein, 15 aa, Homo sapiens
SLEENLPCICYSTLC

SEQ ID NO: 11925 - protein, 10 aa, Homo sapiens
SLFAQRLKTL

SEQ ID NO: 11926 - protein, 9 aa, Homo sapiens
SLIARLERL

SEQ ID NO: 11927 - protein, 9 aa, Homo sapiens
SLIDILVAL

SEQ ID NO: 11928 - protein, 10 aa, Homo sapiens
SLIEDLILLL

SEQ ID NO: 11929 - protein, 9 aa, Homo sapiens
SLIEVVIGL

SEQ ID NO: 11930 - protein, 15 aa, Homo sapiens
SLIEYCIELCYSTLC

SEQ ID NO: 11931 - protein, 9 aa, Homo sapiens
SLIKYFLFV

SEQ ID NO: 11932 - protein, 10 aa, Homo sapiens
SLIPEGPPQV

SEQ ID NO: 11933 - protein, 10 aa, Homo sapiens
SLISIKRLTL

SEQ ID NO: 11934 - protein, 9 aa, Homo sapiens
SLLDELLEV

SEQ ID NO: 11935 - protein, 12 aa, Homo sapiens
SLLDPRVGIRSV

SEQ ID NO: 11936 - protein, 9 aa, Homo sapiens
SLLDTLVLL

SEQ ID NO: 11937 - protein, 9 aa, Homo sapiens
SLLEAVSFL

SEQ ID NO: 11938 - protein, 15 aa, Homo sapiens
SLLEWCQEVCYSTLC

SEQ ID NO: 11939 - protein, 9 aa, Homo sapiens
SLLGFVATV

SEQ ID NO: 11940 - protein, 9 aa, Homo sapiens
SLLLLQLLL

SEQ ID NO: 11941 - protein, 10 aa, Homo sapiens
SLLPPQDPHL

SEQ ID NO: 11942 - protein, 9 aa, Homo sapiens
SLLQVLISI

SEQ ID NO: 11943 - protein, 9 aa, Homo sapiens
SLLSDIIAL

SEQ ID NO: 11944 - protein, 9 aa, Homo sapiens
SLLSHVIVA

SEQ ID NO: 11945 - protein, 10 aa, Homo sapiens
SLLSLLPLFL

SEQ ID NO: 11946 - protein, 11 aa, Homo sapiens
SLLSNDLKLNL

SEQ ID NO: 11947 - protein, 9 aa, Homo sapiens
SLLTAISEV

SEQ ID NO: 11948 - protein, 9 aa, Homo sapiens
SLMALILFL

SEQ ID NO: 11949 - protein, 9 aa, Homo sapiens
SLMDLTLLL

SEQ ID NO: 11950 - protein, 12 aa, Homo sapiens
SLMDPNKFLLLV

SEQ ID NO: 11951 - protein, 9 aa, Homo sapiens
SLMEILYTL

SEQ ID NO: 11952 - protein, 9 aa, Homo sapiens
SLMLVSTVL

SEQ ID NO: 11953 - protein, 9 aa, Homo sapiens
SLQEFLAAL

SEQ ID NO: 11954 - protein, 9 aa, Homo sapiens
SLQELLIQV

SEQ ID NO: 11955 - protein, 15 aa, Homo sapiens
SLSTCIPAICYSTLC

SEQ ID NO: 11956 - protein, 9 aa, Homo sapiens
SLSTVFVVL

SEQ ID NO: 11957 - protein, 9 aa, Homo sapiens
SLVDASWEL

SEQ ID NO: 11958 - protein, 9 aa, Homo sapiens
SLVELLVQL

SEQ ID NO: 11959 - protein, 9 aa, Homo sapiens
SLVGLLLYL

SEQ ID NO: 11960 - protein, 9 aa, Homo sapiens
SLVHINIFL

SEQ ID NO: 11961 - protein, 15 aa, Homo sapiens
SLVYLCYTVCYSTLC

SEQ ID NO: 11962 - protein, 9 aa, Homo sapiens
SLWGTHVVV

SEQ ID NO: 11963 - protein, 9 aa, Homo sapiens
SLYHVESTV

SEQ ID NO: 11964 - protein, 12 aa, Homo sapiens
SLYNDDRNLLRI

SEQ ID NO: 11965 - protein, 9 aa, Homo sapiens
SLYPSAPFL

SEQ ID NO: 11966 - protein, 9 aa, Homo sapiens
SMLLEIIFL

SEQ ID NO: 11967 - protein, 9 aa, Homo sapiens
SMLTLPLSL

SEQ ID NO: 11968 - protein, 9 aa, Homo sapiens
SMMALLVQL

SEQ ID NO: 11969 - protein, 9 aa, Homo sapiens
SPPAILVTV

SEQ ID NO: 11970 - protein, 10 aa, Homo sapiens
SQFQQEFPSL

SEQ ID NO: 11971 - protein, 11 aa, Homo sapiens
SQLDISDPYKV

SEQ ID NO: 11972 - protein, 11 aa, Homo sapiens
SQLDISEPYKV

SEQ ID NO: 11973 - protein, 10 aa, Homo sapiens
SQYDYILPQV

SEQ ID NO: 11974 - protein, 10 aa, Homo sapiens
SVAPFALPTV

SEQ ID NO: 11975 - protein, 9 aa, Homo sapiens
SVFAGVVGV

SEQ ID NO: 11976 - protein, 9 aa, Homo sapiens
SVLDLLVQL

SEQ ID NO: 11977 - protein, 9 aa, Homo sapiens
SVLDLVVAL

SEQ ID NO: 11978 - protein, 11 aa, Homo sapiens
TLADLRVLFGI

SEQ ID NO: 11979 - protein, 9 aa, Homo sapiens
TLAELHISL

SEQ ID NO: 11980 - protein, 15 aa, Homo sapiens
TLCDLYETLCYSTLC

SEQ ID NO: 11981 - protein, 11 aa, Homo sapiens
TLFHDPWKLLI

SEQ ID NO: 11982 - protein, 9 aa, Homo sapiens
TLIAAILYL

SEQ ID NO: 11983 - protein, 11 aa, Homo sapiens
TLIGLSIKVKL

SEQ ID NO: 11984 - protein, 11 aa, Homo sapiens
TLLDASEKLKL

SEQ ID NO: 11985 - protein, 9 aa, Homo sapiens
TLLGVTVTV

SEQ ID NO: 11986 - protein, 9 aa, Homo sapiens
TLLHFLVEI

SEQ ID NO: 11987 - protein, 9 aa, Homo sapiens
TLLHLAVSL

SEQ ID NO: 11988 - protein, 10 aa, Homo sapiens
TLLPGEGPFL

SEQ ID NO: 11989 - protein, 9 aa, Homo sapiens
TLLPTLYEI

SEQ ID NO: 11990 - protein, 9 aa, Homo sapiens
TLMEEVLLL

SEQ ID NO: 11991 - protein, 11 aa, Homo sapiens
TLMEEVLLLGL

SEQ ID NO: 11992 - protein, 9 aa, Homo sapiens
TLQPTLVAV

SEQ ID NO: 11993 - protein, 9 aa, Homo sapiens
TLSNLWIFL

SEQ ID NO: 11994 - protein, 9 aa, Homo sapiens
TLSPLLLFL

SEQ ID NO: 11995 - protein, 15 aa, Homo sapiens
TLVTWLQCVCYSTLC

SEQ ID NO: 11996 - protein, 9 aa, Homo sapiens
TLWQIVINI

SEQ ID NO: 11997 - protein, 9 aa, Homo sapiens
TLWRGPVVV

SEQ ID NO: 11998 - protein, 9 aa, Homo sapiens
TLWYKIFTT

SEQ ID NO: 11999 - protein, 9 aa, Homo sapiens
TLWYVPLSL

SEQ ID NO: 12000 - protein, 9 aa, Homo sapiens
TMLELLLRL

SEQ ID NO: 12001 - protein, 9 aa, Homo sapiens
TMLSLEFHL

SEQ ID NO: 12002 - protein, 12 aa, Homo sapiens
TRDGFDLDLTYV

SEQ ID NO: 12003 - protein, 10 aa, Homo sapiens
TYKDPNNLAF

SEQ ID NO: 12004 - protein, 9 aa, Homo sapiens
VALFKGKQI

SEQ ID NO: 12005 - protein, 12 aa, Homo sapiens
VFGGIGDPVTCL

SEQ ID NO: 12006 - protein, 9 aa, Homo sapiens
VIFDLPTTV

SEQ ID NO: 12007 - protein, 11 aa, Homo sapiens
VILDIPLLFET

SEQ ID NO: 12008 - protein, 9 aa, Homo sapiens
VLEDLEVTV

SEQ ID NO: 12009 - protein, 9 aa, Homo sapiens
VLFELKLLL

SEQ ID NO: 12010 - protein, 9 aa, Homo sapiens
VLFESQFSV

SEQ ID NO: 12011 - protein, 9 aa, Homo sapiens
VLFEVAWEV

SEQ ID NO: 12012 - protein, 9 aa, Homo sapiens
VLFGFVPET

SEQ ID NO: 12013 - protein, 11 aa, Homo sapiens
VLFGWPSLVFV

SEQ ID NO: 12014 - protein, 11 aa, Homo sapiens
VLFSVADRLRL

SEQ ID NO: 12015 - protein, 10 aa, Homo sapiens
VLLEYHIAYL

SEQ ID NO: 12016 - protein, 11 aa, Homo sapiens
VLLFERELHSV

SEQ ID NO: 12017 - protein, 9 aa, Homo sapiens
VLLHVSVLL

SEQ ID NO: 12018 - protein, 9 aa, Homo sapiens
VLLRVLILL

SEQ ID NO: 12019 - protein, 12 aa, Homo sapiens
VLLSEETKRIFL

SEQ ID NO: 12020 - protein, 10 aa, Homo sapiens
VLLTDILVFL

SEQ ID NO: 12021 - protein, 11 aa, Homo sapiens
VLMEDRLTNRL

SEQ ID NO: 12022 - protein, 9 aa, Homo sapiens
VLMGQLYVV

SEQ ID NO: 12023 - protein, 12 aa, Homo sapiens
VLQEFGRIDILV

SEQ ID NO: 12024 - protein, 9 aa, Homo sapiens
VLVSFAYKV

SEQ ID NO: 12025 - protein, 11 aa, Homo sapiens
VLWDLVDRIGI

SEQ ID NO: 12026 - protein, 11 aa, Homo sapiens
VMFKKIKSFEV

SEQ ID NO: 12027 - protein, 9 aa, Homo sapiens
VTEGVIVPE

SEQ ID NO: 12028 - protein, 11 aa, Homo sapiens
VWRHGSYGSAD

SEQ ID NO: 12029 - protein, 9 aa, Homo sapiens
WIILCYIWL

SEQ ID NO: 12030 - protein, 9 aa, Homo sapiens
WLLCFIFTV

SEQ ID NO: 12031 - protein, 9 aa, Homo sapiens
WLPEVMILV

SEQ ID NO: 12032 - protein, 9 aa, Homo sapiens
WPEVLLLLT

SEQ ID NO: 12033 - protein, 10 aa, Homo sapiens
WVSLYCVLSK

SEQ ID NO: 12034 - protein, 9 aa, Homo sapiens
YIAGFFLTV

SEQ ID NO: 12035 - protein, 9 aa, Homo sapiens
YIALKLVAV

SEQ ID NO: 12036 - protein, 12 aa, Homo sapiens
YIMDWMDEMKVL

SEQ ID NO: 12037 - protein, 11 aa, Homo sapiens
YLAGLHANIAV

SEQ ID NO: 12038 - protein, 9 aa, Homo sapiens
YLAIVWPVV

SEQ ID NO: 12039 - protein, 9 aa, Homo sapiens
YLATFALKV

SEQ ID NO: 12040 - protein, 9 aa, Homo sapiens
YLDFRNNSL

SEQ ID NO: 12041 - protein, 9 aa, Homo sapiens
YLDIINLFL

SEQ ID NO: 12042 - protein, 9 aa, Homo sapiens
YLEEILVRV

SEQ ID NO: 12043 - protein, 10 aa, Homo sapiens
YLFDIQLPNI

SEQ ID NO: 12044 - protein, 10 aa, Homo sapiens
YLFEIRDWRL

SEQ ID NO: 12045 - protein, 10 aa, Homo sapiens
YLFGKEMYQV

SEQ ID NO: 12046 - protein, 8 aa, Homo sapiens
YLFKVVLI

SEQ ID NO: 12047 - protein, 9 aa, Homo sapiens
YLFTIINSL

SEQ ID NO: 12048 - protein, 9 aa, Homo sapiens
YLGIVELLV

SEQ ID NO: 12049 - protein, 9 aa, Homo sapiens
YLHEDIPGL

SEQ ID NO: 12050 - protein, 10 aa, Homo sapiens
YLIDRDPTYF

SEQ ID NO: 12051 - protein, 10 aa, Homo sapiens
YLILHLISTV

SEQ ID NO: 12052 - protein, 10 aa, Homo sapiens
YLINFEIRSL

SEQ ID NO: 12053 - protein, 11 aa, Homo sapiens
YLIPFTGIVGL

SEQ ID NO: 12054 - protein, 10 aa, Homo sapiens
YLIQSVPAEL

SEQ ID NO: 12055 - protein, 9 aa, Homo sapiens
YLISELEAA

SEQ ID NO: 12056 - protein, 10 aa, Homo sapiens
YLLDMPLWYL

SEQ ID NO: 12057 - protein, 10 aa, Homo sapiens
YLLEEILDKV

SEQ ID NO: 12058 - protein, 9 aa, Homo sapiens
YLLEKSRIV

SEQ ID NO: 12059 - protein, 10 aa, Homo sapiens
YLMNLNIMTV

SEQ ID NO: 12060 - protein, 10 aa, Homo sapiens
YLMQNWEHVL

SEQ ID NO: 12061 - protein, 9 aa, Homo sapiens
YLNLIELFL

SEQ ID NO: 12062 - protein, 9 aa, Homo sapiens
YLPVKIEQV

SEQ ID NO: 12063 - protein, 11 aa, Homo sapiens
YLQDQHLLLTV

SEQ ID NO: 12064 - protein, 12 aa, Homo sapiens
YLSDEGHYWVGL

SEQ ID NO: 12065 - protein, 11 aa, Homo sapiens
YLSELSEHVKL

SEQ ID NO: 12066 - protein, 9 aa, Homo sapiens
YLSGIIVTL

SEQ ID NO: 12067 - protein, 10 aa, Homo sapiens
YLSHNGIEVI

SEQ ID NO: 12068 - protein, 9 aa, Homo sapiens
YLTSQLPPL

SEQ ID NO: 12069 - protein, 9 aa, Homo sapiens
YLTYILLHL

SEQ ID NO: 12070 - protein, 9 aa, Homo sapiens
YLVELSSLL

SEQ ID NO: 12071 - protein, 9 aa, Homo sapiens
YLVNDIYEL

SEQ ID NO: 12072 - protein, 10 aa, Homo sapiens
YLWEHIFEGL

SEQ ID NO: 12073 - protein, 9 aa, Homo sapiens
YLYEHNFAF

SEQ ID NO: 12074 - protein, 10 aa, Homo sapiens
YLYPIKNLEM

SEQ ID NO: 12075 - protein, 9 aa, Homo sapiens
YMAPEVVEA

SEQ ID NO: 12076 - protein, 9 aa, Homo sapiens
YMFEAREFL

SEQ ID NO: 12077 - protein, 12 aa, Homo sapiens
  misc_feature (11)..(11): Xaa can be any naturally occurring amino acid
YMFEEVPIVIXM

SEQ ID NO: 12078 - protein, 10 aa, Homo sapiens
YMIDNVILLI

SEQ ID NO: 12079 - protein, 11 aa, Homo sapiens
YQFDSALLPAV

SEQ ID NO: 12080 - protein, 9 aa, Homo sapiens
YQSELELRV

SEQ ID NO: 12081 - protein, 12 aa, Homo sapiens
YTIGKEIIDLVL

SEQ ID NO: 12082 - protein, 11 aa, Homo sapiens
YVIAYIRDLAL

SEQ ID NO: 12083 - protein, 9 aa, Homo sapiens
YVLDLAAKV

SEQ ID NO: 12084 - protein, 10 aa, Homo sapiens
YVLEDLEVTV

SEQ ID NO: 12085 - protein, 9 aa, Homo sapiens
YVLKYLFEV

SEQ ID NO: 12086 - protein, 10 aa, Homo sapiens
YVMEYRELFL

SEQ ID NO: 12087 - protein, 12 aa, Homo sapiens
YVNLPINGNGKQ

SEQ ID NO: 12088 - protein, 10 aa, Homo sapiens
SAAGIGILTV

SEQ ID NO: 12089 - protein, 10 aa, Homo sapiens
GVAGIGILTG

SEQ ID NO: 12090 - protein, 9 aa, Homo sapiens
GALNSVLTL

SEQ ID NO: 12091 - protein, 10 aa, Homo sapiens
GVAGIGILTG

SEQ ID NO: 12092 - protein, 10 aa, Homo sapiens
SAAGIGILTV

SEQ ID NO: 12093 - protein, 11 aa, Artificial Sequence
  Epitope
RYLYHRVDVIF

SEQ ID NO: 12094 - protein, 10 aa, Artificial Sequence
  epitope
RYLYHRVDVI

SEQ ID NO: 12095 - protein, 10 aa, Artificial Sequence
  epitope
YLYHRVDVIF

SEQ ID NO: 12096 - protein, 11 aa, Artificial Sequence
  epitope
YLYHRVDVIFC

SEQ ID NO: 12097 - protein, 11 aa, Artificial Sequence
  epitope
FRYLYHRVDVI

SEQ ID NO: 12098 - protein, 9 aa, Artificial Sequence
  epitope
YLYHRVDVI

SEQ ID NO: 12099 - protein, 9 aa, Artificial Sequence
  epitope
RYLYHRVDV

SEQ ID NO: 12100 - protein, 11 aa, Artificial Sequence
  epitope
HIDLLFHSPRA

SEQ ID NO: 12101 - protein, 10 aa, Artificial Sequence
  epitope
EDFVFSKYCH

SEQ ID NO: 12102 - protein, 11 aa, Artificial Sequence
  epitope
QESCEKNDSLS

SEQ ID NO: 12103 - protein, 11 aa, Artificial Sequence
  epitope
SEFFSCLADQH

SEQ ID NO: 12104 - protein, 11 aa, Artificial Sequence
  epitope
ANRFSAVNSLI

SEQ ID NO: 12105 - protein, 11 aa, Artificial Sequence
  epitope
KKQIEHQVLSC

SEQ ID NO: 12106 - protein, 11 aa, Artificial Sequence
  epitope
VEILPFFYLGS

SEQ ID NO: 12107 - protein, 10 aa, Artificial Sequence
  epitope
ASSEQMDVAF

SEQ ID NO: 12108 - protein, 10 aa, Artificial Sequence
  epitope
SSCFDYVMHF

SEQ ID NO: 12109 - protein, 11 aa, Artificial Sequence
  epitope
AFVANLFNTYL

SEQ ID NO: 12110 - protein, 11 aa, Artificial Sequence
  epitope
RCSFSAHQCMH

SEQ ID NO: 12111 - protein, 11 aa, Artificial Sequence
  epitope
RNLLSVGHQLF

SEQ ID NO: 12112 - protein, 11 aa, Artificial Sequence
  epitope
SRRPQAAPVLT

SEQ ID NO: 12113 - protein, 11 aa, Artificial Sequence
  epitope
SDYETFKNFFV

SEQ ID NO: 12114 - protein, 11 aa, Artificial Sequence
  epitope
KDGFLELKCVL

SEQ ID NO: 12115 - protein, 11 aa, Artificial Sequence
  epitope
SKYCHRALLLP

SEQ ID NO: 12116 - protein, 11 aa, Artificial Sequence
  epitope
VKDITDSYNAN

SEQ ID NO: 12117 - protein, 10 aa, Artificial Sequence
  epitope
AKEYFRYLYH

SEQ ID NO: 12118 - protein, 10 aa, Artificial Sequence
  epitope
FRYLYHRVDV

SEQ ID NO: 12119 - protein, 11 aa, Artificial Sequence
  epitope
AKEYFRYLYHR

SEQ ID NO: 12120 - protein, 8 aa, Artificial Sequence
  epitope
FYLYHRVD

SEQ ID NO: 12121 - protein, 9 aa, Artificial Sequence
  epitope
AKEYFRYLY

SEQ ID NO: 12122 - protein, 11 aa, Artificial Sequence
  epitope
EYFRYLYHRVD

SEQ ID NO: 12123 - protein, 11 aa, Artificial Sequence
  epitope
PTAKEYFRYLY

SEQ ID NO: 12124 - protein, 10 aa, Artificial Sequence
  epitope
YFRYLYHRVD

SEQ ID NO: 12125 - protein, 11 aa, Artificial Sequence
  epitope
TAKEYFRYLYH

SEQ ID NO: 12126 - protein, 10 aa, Artificial Sequence
  epitope
EYFRYLYHRV

SEQ ID NO: 12127 - protein, 11 aa, Artificial Sequence
  epitope
KEYFRYLYHRV

SEQ ID NO: 12128 - protein, 9 aa, Artificial Sequence
  epitope
KEYFRYLYH

SEQ ID NO: 12129 - protein, 9 aa, Artificial Sequence
  epitope
EYFRYLYHR

SEQ ID NO: 12130 - protein, 10 aa, Artificial Sequence
  epitope
PTAKEYFRYL

SEQ ID NO: 12131 - protein, 10 aa, Artificial Sequence
  epitope
TAKEYFRYLY

SEQ ID NO: 12132 - protein, 11 aa, Artificial Sequence
  epitope
ELPTAKEYFRY

SEQ ID NO: 12133 - protein, 11 aa, Artificial Sequence
  epitope
LPTAKEYFRYL

SEQ ID NO: 12134 - protein, 11 aa, Artificial Sequence
  epitope
YFRYLYHRVDV

SEQ ID NO: 12135 - protein, 10 aa, Artificial Sequence
  epitope
KEYFRYLYHR

SEQ ID NO: 12136 - protein, 9 aa, Artificial Sequence
  epitope
YFRYLYHRV

SEQ ID NO: 12137 - protein, 9 aa, Artificial Sequence
  epitope
PTAKEYFRY

SEQ ID NO: 12138 - DNA, 28 bp, Artificial Sequence
  primer
agctcctcgagatggcgacgggttcaag

SEQ ID NO: 12139 - DNA, 48 bp, Artificial Sequence
  primer
ccaccgcgagacctcttgctccgcactttacaagctgtgagagacaca

SEQ ID NO: 12140 - DNA, 46 bp, Artificial Sequence
  primer
ccaccgcgagacctcttgctccgagctgtgagagacacatcagagc

SEQ ID NO: 12141 - DNA, 18 bp, Artificial Sequence
  primer
cggagcaagaggtctcgc

SEQ ID NO: 12142 - DNA, 30 bp, Artificial Sequence
  primer
ttgacctcgagtcatcttggtggcagagcc

SEQ ID NO: 12143 - DNA, 15 bp, Artificial Sequence
  primer
caggagggctcggca

SEQ ID NO: 12144 - DNA, 15 bp, Artificial Sequence
  primer
ggaccctccgcatcc

SEQ ID NO: 12145 - DNA, 36 bp, Artificial Sequence
  primer
  misc_feature (16)..(21): n is a, c, g, or t
caggagggctcggcannnnnnggatgcggagggtcc

SEQ ID NO: 12146 - DNA, 75 bp, Artificial Sequence
  primer
aatgatacggcgaccaccgagatctacactctttccctacacgacgctcttccgatctggcctgctttgtttgcc

SEQ ID NO: 12147 - DNA, 53 bp, Artificial Sequence
  primer
gtgactggagttcagacgtgtgctcttccgatctcctccaccaccgctacctc

SEQ ID NO: 12148 - DNA, 58 bp, Artificial Sequence
  primer
caagcagaagacggcatacgagatgtgactggagttcagacgtgtgctcttccgatct

SEQ ID NO: 12149 - DNA, 27 bp, Artificial Sequence
  Cytomegalovirus (CMV)
aatctggttccgatggttgccacagta

SEQ ID NO: 12150 - protein, 9 aa, Artificial Sequence
  Cytomegalovirus (CMV)
NLVPMVATV

SEQ ID NO: 12151 - DNA, 27 bp, Artificial Sequence
  Epstein-Barr Virus (EBV)
ggcctgtgtacgttggtggctatgctg

SEQ ID NO: 12152 - protein, 9 aa, Artificial Sequence
  Epstein-Barr Virus (EBV)
GLCTLVAML

SEQ ID NO: 12153 - protein, 10 aa, Homo sapiens
VMNILLQYVV

SEQ ID NO: 12154 - DNA, 30 bp, Homo sapiens
gttatgaacattttgctgcagtacgtggtg

SEQ ID NO: 12155 - DNA, 42 bp, Homo sapiens
acagtctacggggcattcgaccctctgctggccgtagcagat

SEQ ID NO: 12156 - protein, 14 aa, Homo sapiens
TVYGAFDPLLAVAD

SEQ ID NO: 12157 - DNA, 39 bp, Triticum aestivum
tcaggggagggcagcttccagccgtctcaagaaaatccg

SEQ ID NO: 12158 - protein, 13 aa, Triticum aestivum
SGEGSFQPSQENP

SEQ ID NO: 12159 - DNA, 27 bp, Triticum aestivum
cccttcccccagcccgagctgccctac

SEQ ID NO: 12160 - protein, 9 aa, Triticum aestivum
PFPQPELPY

SEQ ID NO: 12161 - DNA, 27 bp, Homo sapiens
atggtatgggagagcggatgtactgtg

SEQ ID NO: 12162 - protein, 9 aa, Homo sapiens
MVWESGCTV

SEQ ID NO: 12163 - DNA, 27 bp, Homo sapiens
gtcctctttggtcttgggttcgcaatc

SEQ ID NO: 12164 - protein, 9 aa, Homo sapiens
VLFGLGFAI

SEQ ID NO: 12165 - DNA, 27 bp, Homo sapiens
cacctcgtcgaggcattgtacctcgtg

SEQ ID NO: 12166 - protein, 9 aa, Homo sapiens
HLVEALYLV

SEQ ID NO: 12167 - DNA, 45 bp, Homo sapiens
agccacctggtggaggccctgtacctggtgtgcggcgagaggggc

SEQ ID NO: 12168 - protein, 15 aa, Homo sapiens
SHLVEALYLVCGERG

SEQ ID NO: 12169 - DNA, 30 bp, Human immunodeficiency virus
aaaagatggataatcctgggattaaataaa

SEQ ID NO: 12170 - protein, 10 aa, Human immunodeficiency virus
KRWIILGLNK

SEQ ID NO: 12171 - DNA, 48 bp, Listeria monocytogenes
aacgagaagtacgcccaggcctaccccaacgtgagcgccaagatcgac

SEQ ID NO: 12172 - protein, 16 aa, Listeria monocytogenes
NEKYAQAYPNVSAKID

SEQ ID NO: 12173 - DNA, 30 bp, Homo sapiens
gaggccgccggcatcggcatcctgaccgtg

SEQ ID NO: 12174 - protein, 10 aa, Homo sapiens
EAAGIGILTV

SEQ ID NO: 12175 - DNA, 30 bp, Artificial Sequence
  Synthetic
gagctggccggcatcggcatcctgaccgtg

SEQ ID NO: 12176 - protein, 10 aa, Artificial Sequence
  Synthetic
ELAGIGILTV

SEQ ID NO: 12177 - DNA, 27 bp, Homo sapiens
agcctgctgatgtggatcacccagtgc

SEQ ID NO: 12178 - protein, 9 aa, Homo sapiens
SLLMWITQC

SEQ ID NO: 12179 - DNA, 27 bp, Artificial Sequence
  synthetic
tccctgctgatgtggatcacccaggtg

SEQ ID NO: 12180 - protein, 9 aa, Artificial Sequence
  Synthetic
SLLMWITQV

SEQ ID NO: 12181 - DNA, 24 bp, Gallus gallus
agcatcatcaacttcgagaagctg

SEQ ID NO: 12182 - protein, 8 aa, Gallus gallus
SIINFEKL

SEQ ID NO: 12183 - DNA, 51 bp, Gallus gallus
ataagccaggccgttcatgctgcacatgcagaaataaacgaggctggcaga

SEQ ID NO: 12184 - protein, 17 aa, Gallus gallus
ISQAVHAAHAEINEAGR

SEQ ID NO: 12185 - DNA, 30 bp, Homo sapiens
gcactctggggtcctgatccggctgcggct

SEQ ID NO: 12186 - protein, 10 aa, Homo sapiens
ALWGPDPAAA

SEQ ID NO: 12187 - DNA, 51 bp, Homo sapiens
ggcgccggcagcctgcagcccctggccctggagggcagcctgcagaagagg

SEQ ID NO: 12188 - protein, 17 aa, Homo sapiens
GAGSLQPLALEGSLQKR

SEQ ID NO: 12189 - DNA, 54 bp, Homo sapiens
ggaagtttgcagccattggctctggaagggagcctgcaaaaacgcggcattgta

SEQ ID NO: 12190 - protein, 18 aa, Homo sapiens
GSLQPLALEGSLQKRGIV

SEQ ID NO: 12191 - DNA, 54 bp, Artificial Sequence
  synthetic
ggaagtttgcagccattggcttgggaagggagcctgcaaaaacgcggcattgta

SEQ ID NO: 12192 - protein, 18 aa, Artificial Sequence
  synthetic
GSLQPLAWEGSLQKRGIV

SEQ ID NO: 12193 - DNA, 27 bp, Human immunodeficiency virus
tcattatataatacagtagcaaccctc

SEQ ID NO: 12194 - protein, 9 aa, Human immunodeficiency virus
SLYNTVATL

1. A signaling and antigen-presenting bifunctional receptor (SABR) comprising:
an antigen presenting domain; and
a signal transduction domain, wherein the antigen presenting domain comprises a binding fragment of a major histocompatibility complex (MHC) molecule.

2. The SABR of claim 1, wherein the antigen presenting domain comprises a MHC.

3. A nucleic acid encoding for the SABR of claim 1.

4. A cell comprising the nucleic acid of claim 3.

5. The SABR of claim 1, wherein the MHC comprises a Class I MHC.

6. The SABR of claim 1, wherein the MHC comprises a Class II MHC.

7. (canceled)

8. The SABR of claim 1, wherein the signal transduction domain comprises a T cell signaling domain.

9. (canceled)

10. (canceled)

11. The SABR of claim 1, further comprising a transmembrane domain.

12. (canceled)

13. (canceled)

14. (canceled)

15. (canceled)

16. The SABR of claim 1, wherein the antigen presenting domain is fused to the signal transduction domain.

17. The SABR of claim 1, further comprising one or more linkers.

18. A cell comprising:
an extracellular peptide-MHC complex comprising:
an antigen presenting domain linked to a signal transduction domain, wherein the antigen presenting domain comprises an MHC molecule.

19. The cell of claim 18, wherein the cell comprises the SABR of claim 1.

20. An isolated nucleic acid molecule comprising a nucleotide sequence encoding the SABR of claim 1.

21. (canceled)

22. (canceled)

23. (canceled)

24. (canceled)

25. (canceled)

26. (canceled)

27. (canceled)

28. (canceled)

29. (canceled)

30. (canceled)

31. (canceled)

32. (canceled)

33. (canceled)

34. (canceled)

35. (canceled)

36. (canceled)

37. (canceled)

38. A library comprising:
a SABR of any one of claim 1; and
at least one candidate antigen receptor.

39. The library of claim 38, wherein the at least one antigen receptor is expressed on a cell, wherein the cell is an antigen receptor cell.

40. The library of claim 38, wherein the SABR is expressed on a reporter cell, such that the cell provides a detectable marker upon binding of the SABR to the antigen receptor.

41. Original) The library of claim 40, wherein the reporter cell comprises NFAT-GFP-Jurkat cells.

42. The library of claim 39, wherein the antigen receptor cell comprises T cells comprising TCR.

43. The library of claim 39, wherein the antigen receptor cell comprises a cell expressing orphan TCR.

44. (canceled)

45. (canceled)

46. (canceled)

47. (canceled)

48. (canceled)

49. (canceled)

50. (canceled)

51. A SABR comprising;
an extracellular binding domain comprising an MHC and a peptide epitope;
a transmembrane domain; and
a cytoplasmic signaling domain.
